United States Patent Application Publication US 2026/0364102 A1, published November 19, 2026 (application 19/166,792).

The application's sequence listing, which the Patent Office published only in electronic form, follows.

SEQUENCE LISTING (577 sequences)

SEQ ID NO: 1 - RNA, 150 nt, synthetic construct
  source 1..150: mol_type = other RNA
  misc_difference 1..150: note = This sequence may encompass 80-150 nucleotides
aaaaaaaaaaaaaaaaaaaaaaaaaaaaaaaaaaaaaaaaaaaaaaaaaaaaaaaaaaaaaaaaaaaaaaaaaaaaaaaaaaaaaaaaaaaaaaaaaaaaaaaaaaaaaaaaaaaaaaaaaaaaaaaaaaaaaaaaaaaaaaaaaaaaaa

SEQ ID NO: 2 - protein, 2040 aa, Homo sapiens
MEHKEVVLLLLLFLKSAAPEQSHVVQDCYHGDGQSYRGTYSTTVTGRTCQAWSSMTPHQHNRTTENYPNAGLIMNYCRNPDAVAAPYCYTRDPGVRWEYCNLTQCSDAEGTAVAPPTVTPVPSLEAPSEQAPTEQRPGVQECYHGNGQSYRGTYSTTVTGRTCQAWSSMTPHSHSRTPEYYPNAGLIMNYCRNPDAVAAPYCYTRDPGVRWEYCNLTQCSDAEGTAVAPPTVTPVPSLEAPSEQAPTEQRPGVQECYHGNGQSYRGTYSTTVTGRTCQAWSSMTPHSHSRTPEYYPNAGLIMNYCRNPDAVAAPYCYTRDPGVRWEYCNLTQCSDAEGTAVAPPTVTPVPSLEAPSEQAPTEQRPGVQECYHGNGQSYRGTYSTTVTGRTCQAWSSMTPHSHSRTPEYYPNAGLIMNYCRNPDAVAAPYCYTRDPGVRWEYCNLTQCSDAEGTAVAPPTVTPVPSLEAPSEQAPTEQRPGVQECYHGNGQSYRGTYSTTVTGRTCQAWSSMTPHSHSRTPEYYPNAGLIMNYCRNPDAVAAPYCYTRDPGVRWEYCNLTQCSDAEGTAVAPPTVTPVPSLEAPSEQAPTEQRPGVQECYHGNGQSYRGTYSTTVTGRTCQAWSSMTPHSHSRTPEYYPNAGLIMNYCRNPDAVAAPYCYTRDPGVRWEYCNLTQCSDAEGTAVAPPTVTPVPSLEAPSEQAPTEQRPGVQECYHGNGQSYRGTYSTTVTGRTCQAWSSMTPHSHSRTPEYYPNAGLIMNYCRNPDAVAAPYCYTRDPGVRWEYCNLTQCSDAEGTAVAPPTVTPVPSLEAPSEQAPTEQRPGVQECYHGNGQSYRGTYSTTVTGRTCQAWSSMTPHSHSRTPEYYPNAGLIMNYCRNPDPVAAPYCYTRDPSVRWEYCNLTQCSDAEGTAVAPPTITPIPSLEAPSEQAPTEQRPGVQECYHGNGQSYQGTYFITVTGRTCQAWSSMTPHSHSRTPAYYPNAGLIKNYCRNPDPVAAPWCYTTDPSVRWEYCNLTRCSDAEWTAFVPPNVILAPSLEAFFEQALTEETPGVQDCYYHYGQSYRGTYSTTVTGRTCQAWSSMTPHQHSRTPENYPNAGLTRNYCRNPDAEIRPWCYTMDPSVRWEYCNLTQCLVTESSVLATLTVVPDPSTEASSEEAPTEQSPGVQDCYHGDGQSYRGSFSTTVTGRTCQSWSSMTPHWHQRTTEYYPNGGLTRNYCRNPDAEISPWCYTMDPNVRWEYCNLTQCPVTESSVLATSTAVSEQAPTEQSPTVQDCYHGDGQSYRGSFSTTVTGRTCQSWSSMTPHWHQRTTEYYPNGGLTRNYCRNPDAEIRPWCYTMDPSVRWEYCNLTQCPVMESTLLTTPTVVPVPSTELPSEEAPTENSTGVQDCYRGDGQSYRGTLSTTITGRTCQSWSSMTPHWHRRIPLYYPNAGLTRNYCRNPDAEIRPWCYTMDPSVRWEYCNLTRCPVTESSVLTTPTVAPVPSTEAPSEQAPPEKSPVVQDCYHGDGRSYRGISSTTVTGRTCQSWSSMIPHWHQRTPENYPNAGLTENYCRNPDSGKQPWCYTTDPCVRWEYCNLTQCSETESGVLETPTVVPVPSMEAHSEAAPTEQTPVVRQCYHGNGQSYRGTFSTTVTGRTCQSWSSMTPHRHQRTPENYPNDGLTMNYCRNPDADTGPWCFTMDPSIRWEYCNLTRCSDTEGTVVAPPTVIQVPSLGPPSEQDCMFGNGKGYRGKKATTVTGTPCQEWAAQEPHRHSTFIPGTNKWAGLEKNYCRNPDGDINGPWCYTMNPRKLFDYCDIPLCASSSFDCGKPQVEPKKCPGSIVGGCVAHPHSWPWQVSLRTRFGKHFCGGTLISPEWVLTAAHCLKKSSRPSSYKVILGAHQEVNLESHVQEIEVSRLFLEPTQADIALLKLSRPAVITDKVMPACLPSPDYMVTARTECYITGWGETQGTFGTGLLKEAQLLVIENEVCNHYKYICAEHLARGTDSCQGDSGGPLVCFEKDKYILQGVTSWGLGCARPNKPGVYARVSRFVTWIEGMMRNN

SEQ ID NO: 3 - protein, 1390 aa, synthetic construct
MDKKYSIGLAIGTNSVGWAVITDEYKVPSKKFKVLGNTDRHSIKKNLIGALLFDSGETAEATRLKRTARRRYTRRKNRICYLQEIFSNEMAKVDDSFFHRLEESFLVEEDKKHERHPIFGNIVDEVAYHEKYPTIYHLRKKLVDSTDKADLRLIYLALAHMIKFRGHFLIEGDLNPDNSDVDKLFIQLVQTYNQLFEENPINASGVDAKAILSARLSKSRRLENLIAQLPGEKKNGLFGNLIALSLGLTPNFKSNFDLAEDAKLQLSKDTYDDDLDNLLAQIGDQYADLFLAAKNLSDAILLSDILRVNTEITKAPLSASMIKRYDEHHQDLTLLKALVRQQLPEKYKEIFFDQSKNGYAGYIDGGASQEEFYKFIKPILEKMDGTEELLVKLNREDLLRKQRTFDNGSIPHQIHLGELHAILRRQEDFYPFLKDNREKIEKILTFRIPYYVGPLARGNSRFAWMTRKSEETITPWNFEEVVDKGASAQSFIERMTNFDKNLPNEKVLPKHSLLYEYFTVYNELTKVKYVTEGMRKPAFLSGEQKKAIVDLLFKTNRKVTVKQLKEDYFKKIECFDSVEISGVEDRFNASLGTYHDLLKIIKDKDFLDNEENEDILEDIVLTLTLFEDREMIEERLKTYAHLFDDKVMKQLKRRRYTGWGRLSRKLINGIRDKQSGKTILDFLKSDGFANRNFMQLIHDDSLTFKEDIQKAQVSGQGDSLHEHIANLAGSPAIKKGILQTVKVVDELVKVMGRHKPENIVIEMARENQTTQKGQKNSRERMKRIEEGIKELGSQILKEHPVENTQLQNEKLYLYYLQNGRDMYVDQELDINRLSDYDVDHIVPQSFLKDDSIDNKVLTRSDKNRGKSDNVPSEEVVKKMKNYWRQLLNAKLITQRKFDNLTKAERGGLSELDKAGFIKRQLVETRQITKHVAQILDSRMNTKYDENDKLIREVKVITLKSKLVSDFRKDFQFYKVREINNYHHAHDAYLNAVVGTALIKKYPKLESEFVYGDYKVYDVRKMIAKSEQEIGKATAKYFFYSNIMNFFKTEITLANGEIRKRPLIETNGETGEIVWDKGRDFATVRKVLSMPQVNIVKKTEVQTGGFSKESILPKRNSDKLIARKKDWDPKKYGGFDSPTVAYSVLVVAKVEKGKSKKLKSVKELLGITIMERSSFEKNPIDFLEAKGYKEVKKDLIIKLPKYSLFELENGRKRMLASAGELQKGNELALPSKYVNFLYLASHYEKLKGSPEDNEQKQLFVEQHKHYLDEIIEQISEFSKRVILADANLDKVLSAYNKHRDKPIREQAENIIHLFTLTNLGAPAAFKYFDTTIDRKRYTSTKEVLDATLIHQSITGLYETRIDLSQLGGDEGADKRTADGSEFESPKKKRKV

SEQ ID NO: 4 - DNA, 4356 bp, synthetic construct
  source 1..4356: mol_type = other DNA
aggactcctccccatcctctccctctgtccctctgtccctctgaccctgcactgtcccagcaccatggacaagaagtacagcatcggcctggccatcggcaccaacagcgtgggctgggccgtgatcaccgacgagtacaaggtgcccagcaagaagttcaaggtgctgggcaacaccgaccgccacagcatcaagaagaacctgatcggcgccctgctgttcgacagcggcgagacagccgaggccacccgcctgaagcgcaccgcccgccgccgctacacccgccgcaagaaccgcatctgctacctgcaggagatcttcagcaacgagatggccaaggtggacgacagcttcttccaccgcctggaggagagcttcctggtggaggaggacaagaagcacgagcgccaccccatcttcggcaacatcgtggacgaggtggcctaccacgagaagtaccccaccatctaccacctgcgcaagaagctggtggacagcaccgacaaggccgacctgcgcctgatctacctggccctggcccacatgatcaagttccgcggccacttcctgatcgagggcgacctgaaccccgacaacagcgacgtggacaagctgttcatccagctggtgcagacctacaaccagctgttcgaggagaaccccatcaacgccagcggcgtggacgccaaggccatcctgagcgcccgcctgagcaagagccgccgcctggagaacctgatcgcccagctgcccggcgagaagaagaacggcctgttcggcaacctgatcgccctgagcctgggcctgacccccaacttcaagagcaacttcgacctggccgaggacgccaagctgcagctgagcaaggacacctacgacgacgacctggacaacctgctggcccagatcggcgaccagtacgccgacctgttcctggccgccaagaacctgagcgacgccatcctgctgagcgacatcctgcgcgtgaacaccgagatcaccaaggcccccctgagcgccagcatgatcaagcgctacgacgagcaccaccaggacctgaccctgctgaaggccctggtgcgccagcagctgcccgagaagtacaaggagatcttcttcgaccagagcaagaacggctacgccggctacatcgacggcggcgccagccaggaggagttctacaagttcatcaagcccatcctggagaagatggacggcaccgaggagctgctggtgaagctgaaccgcgaggacctgctgcgcaagcagcgcaccttcgacaacggcagcatcccccaccagatccacctgggcgagctgcacgccatcctgcgccgccaggaggacttctaccccttcctgaaggacaaccgcgagaagatcgagaagatcctgaccttccgcatcccctactacgtgggccccctggcccgcggcaacagccgcttcgcctggatgacccgcaagagcgaggagacaatcaccccctggaacttcgaggaggtggtggacaagggcgccagcgcccagagcttcatcgagcgcatgaccaacttcgacaagaacctgcccaacgagaaggtgctgcccaagcacagcctgctgtacgagtacttcaccgtgtacaacgagctgaccaaggtgaagtacgtgaccgagggcatgcgcaagcccgccttcctgagcggcgagcagaagaaggccatcgtggacctgctgttcaagaccaaccgcaaggtgaccgtgaagcagctgaaggaggactacttcaagaagatcgagtgcttcgacagcgtggagatcagcggcgtggaggaccgcttcaacgccagcctgggcacctaccacgacctgctgaagatcatcaaggacaaggacttcctggacaacgaggagaacgaggacatcctggaggacatcgtgctgaccctgaccctgttcgaggaccgcgagatgatcgaggagcgcctgaagacctacgcccacctgttcgacgacaaggtgatgaagcagctgaagcgccgccgctacaccggctggggccgcctgagccgcaagctgatcaacggcatccgcgacaagcagagcggcaagaccatcctggacttcctcaagagcgacggcttcgccaaccgcaacttcatgcagctgatccacgacgacagcctgaccttcaaggaggacatccagaaggcccaggtgagcggccagggcgacagcctgcacgagcacatcgccaacctggccggcagccccgccatcaagaagggcatcctgcagaccgtgaaggtggtggacgagctggtgaaggtgatgggccgccacaagcccgagaacatcgtgatcgagatggcccgcgagaaccagaccacccagaagggccagaagaacagccgcgagcgcatgaagcgcatcgaggagggcatcaaggagctgggcagccagatcctgaaggagcaccccgtggagaacacccagctgcagaacgagaagctgtacctgtactacctgcagaacggccgcgacatgtacgtggaccaggagctggacatcaaccgcctgagcgactacgacgtggaccacatcgtgccccagagcttcctgaaggacgacagcatcgacaacaaggtgctgacccgcagcgacaagaaccgcggcaagagcgacaacgtgcccagcgaggaggtggtgaagaagatgaagaactactggcgccagctgctgaacgccaagctgatcacccagcgcaagttcgacaacctgaccaaggccgagcgcggcggcctgagcgagctggacaaggccggcttcatcaagcgccagctggtggagacacgccagatcaccaagcacgtggcccagatcctggacagccgcatgaacaccaagtacgacgagaacgacaagctgatccgcgaggtgaaggtgatcaccctcaagagcaagctggtgagcgacttccgcaaggacttccagttctacaaggtgcgcgagatcaacaactaccaccacgcccacgacgcctacctgaacgccgtggtgggcaccgccctgatcaagaagtaccccaagctggagagcgagttcgtgtacggcgactacaaggtgtacgacgtgcgcaagatgatcgccaagagcgagcaggagatcggcaaggccaccgccaagtacttcttctacagcaacatcatgaacttcttcaagaccgagatcaccctggccaacggcgagatccgcaagcgccccctgatcgagacaaacggcgagacaggcgagatcgtgtgggacaagggccgcgacttcgccaccgtgcgcaaggtgctgagcatgccccaggtgaacatcgtgaagaagaccgaggtgcagaccggcggcttcagcaaggagagcatcctgcccaagcgcaacagcgacaagctgatcgcccgcaagaaggactgggaccccaagaagtacggcggcttcgacagccccaccgtggcctacagcgtgctggtggtggccaaggtggagaagggcaagagcaagaagctcaagagcgtgaaggagctgctgggcatcaccatcatggagcgcagcagcttcgagaagaaccccatcgacttcctggaggccaagggctacaaggaggtgaagaaggacctgatcatcaagctgcccaagtacagcctgttcgagctggagaacggccgcaagcgcatgctggccagcgccggcgagctgcagaagggcaacgagctggccctgcccagcaagtacgtgaacttcctgtacctggccagccactacgagaagctgaagggcagccccgaggacaacgagcagaagcagctgttcgtggagcagcacaagcactacctggacgagatcatcgagcagatcagcgagttcagcaagcgcgtgatcctggccgacgccaacctggacaaggtgctgagcgcctacaacaagcaccgcgacaagcccatccgcgagcaggccgagaacatcatccacctgttcaccctgaccaacctgggcgcccccgccgccttcaagtacttcgacaccaccatcgaccgcaagcgctacaccagcaccaaggaggtgctggacgccaccctgatccaccagagcatcaccggcctgtacgagacacgcatcgacctgagccagctgggcggcgacgagggcgccgacaagcgcaccgccgacggcagcgagttcgagagccccaagaagaagcgcaaggtgtaaagtgtccagaccattgtcttccaaccccagctggcctctagaacacccactggccagtcctagagctcctgtccctacccactctttgctacaataaatgctgaatgaatccatctaga

SEQ ID NO: 5 - RNA, 64 nt, synthetic construct
  source 1..64: mol_type = other RNA
  modified_base 6: mod_base = OTHER; note = N1-methyl pseudouridine
  modified_base 9: mod_base = OTHER; note = N1-methyl pseudouridine
  modified_base 15: mod_base = OTHER; note = N1-methyl pseudouridine
  modified_base 18: mod_base = OTHER; note = N1-methyl pseudouridine
  modified_base 20: mod_base = OTHER; note = N1-methyl pseudouridine
  modified_base 24: mod_base = OTHER; note = N1-methyl pseudouridine
  modified_base 26: mod_base = OTHER; note = N1-methyl pseudouridine
  modified_base 28: mod_base = OTHER; note = N1-methyl pseudouridine
  modified_base 32: mod_base = OTHER; note = N1-methyl pseudouridine
  modified_base 34: mod_base = OTHER; note = N1-methyl pseudouridine
  modified_base 36: mod_base = OTHER; note = N1-methyl pseudouridine
  modified_base 40: mod_base = OTHER; note = N1-methyl pseudouridine
  modified_base 42: mod_base = OTHER; note = N1-methyl pseudouridine
  modified_base 48: mod_base = OTHER; note = N1-methyl pseudouridine
  modified_base 53: mod_base = OTHER; note = N1-methyl pseudouridine
  modified_base 55: mod_base = OTHER; note = N1-methyl pseudouridine
aggacnccnccccanccncncccncngncccncngncccncngacccngcacngncccagcacc

SEQ ID NO: 6 - RNA, 4173 nt, synthetic construct
  source 1..4173: mol_type = other RNA
  modified_base 2: mod_base = OTHER; note = N1-methyl pseudouridine
  modified_base 13: mod_base = OTHER; note = N1-methyl pseudouridine
  modified_base 20: mod_base = OTHER; note = N1-methyl pseudouridine
  modified_base 26: mod_base = OTHER; note = N1-methyl pseudouridine
  modified_base 32: mod_base = OTHER; note = N1-methyl pseudouridine
  modified_base 47: mod_base = OTHER; note = N1-methyl pseudouridine
  modified_base 52: mod_base = OTHER; note = N1-methyl pseudouridine
  modified_base 59: mod_base = OTHER; note = N1-methyl pseudouridine
  modified_base 62: mod_base = OTHER; note = N1-methyl pseudouridine
  modified_base 73: mod_base = OTHER; note = N1-methyl pseudouridine
  modified_base 80: mod_base = OTHER; note = N1-methyl pseudouridine
  modified_base 94: mod_base = OTHER; note = N1-methyl pseudouridine
  modified_base 95: mod_base = OTHER; note = N1-methyl pseudouridine
  modified_base 101: mod_base = OTHER; note = N1-methyl pseudouridine
  modified_base 104: mod_base = OTHER; note = N1-methyl pseudouridine
  modified_base 128: mod_base = OTHER; note = N1-methyl pseudouridine
  modified_base 140: mod_base = OTHER; note = N1-methyl pseudouridine
  modified_base 143: mod_base = OTHER; note = N1-methyl pseudouridine
  modified_base 152: mod_base = OTHER; note = N1-methyl pseudouridine
  modified_base 155: mod_base = OTHER; note = N1-methyl pseudouridine
  modified_base 157: mod_base = OTHER; note = N1-methyl pseudouridine
  modified_base 158: mod_base = OTHER; note = N1-methyl pseudouridine
  modified_base 191: mod_base = OTHER; note = N1-methyl pseudouridine
  modified_base 214: mod_base = OTHER; note = N1-methyl pseudouridine
  modified_base 236: mod_base = OTHER; note = N1-methyl pseudouridine
  modified_base 238: mod_base = OTHER; note = N1-methyl pseudouridine
  modified_base 241: mod_base = OTHER; note = N1-methyl pseudouridine
  modified_base 245: mod_base = OTHER; note = N1-methyl pseudouridine
  modified_base 254: mod_base = OTHER; note = N1-methyl pseudouridine
  modified_base 256: mod_base = OTHER; note = N1-methyl pseudouridine
  modified_base 257: mod_base = OTHER; note = N1-methyl pseudouridine
  modified_base 269: mod_base = OTHER; note = N1-methyl pseudouridine
  modified_base 278: mod_base = OTHER; note = N1-methyl pseudouridine
  modified_base 289: mod_base = OTHER; note = N1-methyl pseudouridine
  modified_base 290: mod_base = OTHER; note = N1-methyl pseudouridine
  modified_base 292: mod_base = OTHER; note = N1-methyl pseudouridine
  modified_base 293: mod_base = OTHER; note = N1-methyl pseudouridine
  modified_base 302: mod_base = OTHER; note = N1-methyl pseudouridine
  modified_base 313: mod_base = OTHER; note = N1-methyl pseudouridine
  modified_base 314: mod_base = OTHER; note = N1-methyl pseudouridine
  modified_base 317: mod_base = OTHER; note = N1-methyl pseudouridine
  modified_base 320: mod_base = OTHER; note = N1-methyl pseudouridine
  modified_base 353: mod_base = OTHER; note = N1-methyl pseudouridine
  modified_base 355: mod_base = OTHER; note = N1-methyl pseudouridine
  modified_base 356: mod_base = OTHER; note = N1-methyl pseudouridine
  modified_base 365: mod_base = OTHER; note = N1-methyl pseudouridine
  modified_base 368: mod_base = OTHER; note = N1-methyl pseudouridine
  modified_base 377: mod_base = OTHER; note = N1-methyl pseudouridine
  modified_base 382: mod_base = OTHER; note = N1-methyl pseudouridine
  modified_base 394: mod_base = OTHER; note = N1-methyl pseudouridine
  modified_base 404: mod_base = OTHER; note = N1-methyl pseudouridine
  modified_base 406: mod_base = OTHER; note = N1-methyl pseudouridine
  modified_base 413: mod_base = OTHER; note = N1-methyl pseudouridine
  modified_base 425: mod_base = OTHER; note = N1-methyl pseudouridine
  modified_base 428: mod_base = OTHER; note = N1-methyl pseudouridine
  modified_base 452: mod_base = OTHER; note = N1-methyl pseudouridine
  modified_base 458: mod_base = OTHER; note = N1-methyl pseudouridine
  modified_base 461: mod_base = OTHER; note = N1-methyl pseudouridine
  modified_base 463: mod_base = OTHER; note = N1-methyl pseudouridine
  modified_base 467: mod_base = OTHER; note = N1-methyl pseudouridine
  modified_base 473: mod_base = OTHER; note = N1-methyl pseudouridine
  modified_base 482: mod_base = OTHER; note = N1-methyl pseudouridine
  modified_base 485: mod_base = OTHER; note = N1-methyl pseudouridine
  modified_base 490: mod_base = OTHER; note = N1-methyl pseudouridine
  modified_base 491: mod_base = OTHER; note = N1-methyl pseudouridine
  modified_base 502: mod_base = OTHER; note = N1-methyl pseudouridine
  modified_base 503: mod_base = OTHER; note = N1-methyl pseudouridine
  modified_base 506: mod_base = OTHER; note = N1-methyl pseudouridine
  modified_base 509: mod_base = OTHER; note = N1-methyl pseudouridine
  modified_base 521: mod_base = OTHER; note = N1-methyl pseudouridine
  modified_base 542: mod_base = OTHER; note = N1-methyl pseudouridine
  modified_base 551: mod_base = OTHER; note = N1-methyl pseudouridine
  modified_base 553: mod_base = OTHER; note = N1-methyl pseudouridine
  modified_base 554: mod_base = OTHER; note = N1-methyl pseudouridine
  modified_base 557: mod_base = OTHER; note = N1-methyl pseudouridine
  modified_base 563: mod_base = OTHER; note = N1-methyl pseudouridine
  modified_base 566: mod_base = OTHER; note = N1-methyl pseudouridine
  modified_base 574: mod_base = OTHER; note = N1-methyl pseudouridine
  modified_base 584: mod_base = OTHER; note = N1-methyl pseudouridine
  modified_base 586: mod_base = OTHER; note = N1-methyl pseudouridine
  modified_base 587: mod_base = OTHER; note = N1-methyl pseudouridine
  modified_base 602: mod_base = OTHER; note = N1-methyl pseudouridine
  modified_base 617: mod_base = OTHER; note = N1-methyl pseudouridine
  modified_base 632: mod_base = OTHER; note = N1-methyl pseudouridine
  modified_base 635: mod_base = OTHER; note = N1-methyl pseudouridine
  modified_base 647: mod_base = OTHER; note = N1-methyl pseudouridine
  modified_base 665: mod_base = OTHER; note = N1-methyl pseudouridine
  modified_base 674: mod_base = OTHER; note = N1-methyl pseudouridine
  modified_base 677: mod_base = OTHER; note = N1-methyl pseudouridine
  modified_base 686: mod_base = OTHER; note = N1-methyl pseudouridine
  modified_base 710: mod_base = OTHER; note = N1-methyl pseudouridine
  modified_base 712: mod_base = OTHER; note = N1-methyl pseudouridine
  modified_base 713: mod_base = OTHER; note = N1-methyl pseudouridine
  modified_base 722: mod_base = OTHER; note = N1-methyl pseudouridine
  modified_base 725: mod_base = OTHER; note = N1-methyl pseudouridine
  modified_base 731: mod_base = OTHER; note = N1-methyl pseudouridine
  modified_base 737: mod_base = OTHER; note = N1-methyl pseudouridine
  modified_base 743: mod_base = OTHER; note = N1-methyl pseudouridine
  modified_base 754: mod_base = OTHER; note = N1-methyl pseudouridine
  modified_base 755: mod_base = OTHER; note = N1-methyl pseudouridine
  modified_base 766: mod_base = OTHER; note = N1-methyl pseudouridine
  modified_base 767: mod_base = OTHER; note = N1-methyl pseudouridine
  modified_base 773: mod_base = OTHER; note = N1-methyl pseudouridine
  modified_base 791: mod_base = OTHER; note = N1-methyl pseudouridine
  modified_base 797: mod_base = OTHER; note = N1-methyl pseudouridine
  modified_base 811: mod_base = OTHER; note = N1-methyl pseudouridine
  modified_base 824: mod_base = OTHER; note = N1-methyl pseudouridine
  modified_base 833: mod_base = OTHER; note = N1-methyl pseudouridine
  modified_base 836: mod_base = OTHER; note = N1-methyl pseudouridine
  modified_base 845: mod_base = OTHER; note = N1-methyl pseudouridine
  modified_base 856: mod_base = OTHER; note = N1-methyl pseudouridine
  modified_base 866: mod_base = OTHER; note = N1-methyl pseudouridine
  modified_base 868: mod_base = OTHER; note = N1-methyl pseudouridine
  modified_base 869: mod_base = OTHER; note = N1-methyl pseudouridine
  modified_base 872: mod_base = OTHER; note = N1-methyl pseudouridine
  modified_base 887: mod_base = OTHER; note = N1-methyl pseudouridine
  modified_base 899: mod_base = OTHER; note = N1-methyl pseudouridine
  modified_base 902: mod_base = OTHER; note = N1-methyl pseudouridine
  modified_base 905: mod_base = OTHER; note = N1-methyl pseudouridine
  modified_base 914: mod_base = OTHER; note = N1-methyl pseudouridine
  modified_base 917: mod_base = OTHER; note = N1-methyl pseudouridine
  modified_base 923: mod_base = OTHER; note = N1-methyl pseudouridine
  modified_base 935: mod_base = OTHER; note = N1-methyl pseudouridine
  modified_base 950: mod_base = OTHER; note = N1-methyl pseudouridine
  modified_base 962: mod_base = OTHER; note = N1-methyl pseudouridine
  modified_base 965: mod_base = OTHER; note = N1-methyl pseudouridine
  modified_base 973: mod_base = OTHER; note = N1-methyl pseudouridine
  modified_base 995: mod_base = OTHER; note = N1-methyl pseudouridine
  modified_base 1001: mod_base = OTHER; note = N1-methyl pseudouridine
  modified_base 1004: mod_base = OTHER; note = N1-methyl pseudouridine
  modified_base 1013: mod_base = OTHER; note = N1-methyl pseudouridine
  modified_base 1016: mod_base = OTHER; note = N1-methyl pseudouridine
  modified_base 1028: mod_base = OTHER; note = N1-methyl pseudouridine
  modified_base 1039: mod_base = OTHER; note = N1-methyl pseudouridine
  modified_base 1049: mod_base = OTHER; note = N1-methyl pseudouridine
  modified_base 1051: mod_base = OTHER; note = N1-methyl pseudouridine
  modified_base 1052: mod_base = OTHER; note = N1-methyl pseudouridine
  modified_base 1054: mod_base = OTHER; note = N1-methyl pseudouridine
  modified_base 1055: mod_base = OTHER; note = N1-methyl pseudouridine
  modified_base 1075: mod_base = OTHER; note = N1-methyl pseudouridine
  modified_base 1084: mod_base = OTHER; note = N1-methyl pseudouridine
  modified_base 1088: mod_base = OTHER; note = N1-methyl pseudouridine
  modified_base 1114: mod_base = OTHER; note = N1-methyl pseudouridine
  modified_base 1115: mod_base = OTHER; note = N1-methyl pseudouridine
  modified_base 1117: mod_base = OTHER; note = N1-methyl pseudouridine
  modified_base 1123: mod_base = OTHER; note = N1-methyl pseudouridine
  modified_base 1124: mod_base = OTHER; note = N1-methyl pseudouridine
  modified_base 1127: mod_base = OTHER; note = N1-methyl pseudouridine
  modified_base 1136: mod_base = OTHER; note = N1-methyl pseudouridine
  modified_base 1139: mod_base = OTHER; note = N1-methyl pseudouridine
  modified_base 1148: mod_base = OTHER; note = N1-methyl pseudouridine
  modified_base 1166: mod_base = OTHER; note = N1-methyl pseudouridine
  modified_base 1169: mod_base = OTHER; note = N1-methyl pseudouridine
  modified_base 1172: mod_base = OTHER; note = N1-methyl pseudouridine
  modified_base 1178: mod_base = OTHER; note = N1-methyl pseudouridine
  modified_base 1193: mod_base = OTHER; note = N1-methyl pseudouridine
  modified_base 1196: mod_base = OTHER; note = N1-methyl pseudouridine
  modified_base 1213: mod_base = OTHER; note = N1-methyl pseudouridine
  modified_base 1214: mod_base = OTHER; note = N1-methyl pseudouridine
  modified_base 1229: mod_base = OTHER; note = N1-methyl pseudouridine
  modified_base 1241: mod_base = OTHER; note = N1-methyl pseudouridine
  modified_base 1247: mod_base = OTHER; note = N1-methyl pseudouridine
  modified_base 1256: mod_base = OTHER; note = N1-methyl pseudouridine
  modified_base 1265: mod_base = OTHER; note = N1-methyl pseudouridine
  modified_base 1268: mod_base = OTHER; note = N1-methyl pseudouridine
  modified_base 1285: mod_base = OTHER; note = N1-methyl pseudouridine
  modified_base 1286: mod_base = OTHER; note = N1-methyl pseudouridine
  modified_base 1288: mod_base = OTHER; note = N1-methyl pseudouridine
  modified_base 1294: mod_base = OTHER; note = N1-methyl pseudouridine
  modified_base 1295: mod_base = OTHER; note = N1-methyl pseudouridine
  modified_base 1298: mod_base = OTHER; note = N1-methyl pseudouridine
  modified_base 1319: mod_base = OTHER; note = N1-methyl pseudouridine
  modified_base 1328: mod_base = OTHER; note = N1-methyl pseudouridine
  modified_base 1331: mod_base = OTHER; note = N1-methyl pseudouridine
  modified_base 1336: mod_base = OTHER; note = N1-methyl pseudouridine
  modified_base 1337: mod_base = OTHER; note = N1-methyl pseudouridine
  modified_base 1343: mod_base = OTHER; note = N1-methyl pseudouridine
  modified_base 1348: mod_base = OTHER; note = N1-methyl pseudouridine
  modified_base 1351: mod_base = OTHER; note = N1-methyl pseudouridine
  modified_base 1355: mod_base = OTHER; note = N1-methyl pseudouridine
  modified_base 1364: mod_base = OTHER; note = N1-methyl pseudouridine
  modified_base 1384: mod_base = OTHER; note = N1-methyl pseudouridine
  modified_base 1385: mod_base = OTHER; note = N1-methyl pseudouridine
  modified_base 1390: mod_base = OTHER; note = N1-methyl pseudouridine
  modified_base 1394: mod_base = OTHER; note = N1-methyl pseudouridine
  modified_base 1418: mod_base = OTHER; note = N1-methyl pseudouridine
  modified_base 1426: mod_base = OTHER; note = N1-methyl pseudouridine
  modified_base 1432: mod_base = OTHER; note = N1-methyl pseudouridine
  modified_base 1433: mod_base = OTHER; note = N1-methyl pseudouridine
  modified_base 1442: mod_base = OTHER; note = N1-methyl pseudouridine
  modified_base 1445: mod_base = OTHER; note = N1-methyl pseudouridine
  modified_base 1471: mod_base = OTHER; note = N1-methyl pseudouridine
  modified_base 1472: mod_base = OTHER; note = N1-methyl pseudouridine
  modified_base 1475: mod_base = OTHER; note = N1-methyl pseudouridine
  modified_base 1484: mod_base = OTHER; note = N1-methyl pseudouridine
  modified_base 1492: mod_base = OTHER; note = N1-methyl pseudouridine
  modified_base 1493: mod_base = OTHER; note = N1-methyl pseudouridine
  modified_base 1505: mod_base = OTHER; note = N1-methyl pseudouridine
  modified_base 1520: mod_base = OTHER; note = N1-methyl pseudouridine
  modified_base 1523: mod_base = OTHER; note = N1-methyl pseudouridine
  modified_base 1538: mod_base = OTHER; note = N1-methyl pseudouridine
  modified_base 1541: mod_base = OTHER; note = N1-methyl pseudouridine
  modified_base 1543: mod_base = OTHER; note = N1-methyl pseudouridine
  modified_base 1549: mod_base = OTHER; note = N1-methyl pseudouridine
  modified_base 1552: mod_base = OTHER; note = N1-methyl pseudouridine
  modified_base 1553: mod_base = OTHER; note = N1-methyl pseudouridine
  modified_base 1559: mod_base = OTHER; note = N1-methyl pseudouridine
  modified_base 1561: mod_base = OTHER; note = N1-methyl pseudouridine
  modified_base 1571: mod_base = OTHER; note = N1-methyl pseudouridine
  modified_base 1580: mod_base = OTHER; note = N1-methyl pseudouridine
  modified_base 1585: mod_base = OTHER; note = N1-methyl pseudouridine
  modified_base 1589: mod_base = OTHER; note = N1-methyl pseudouridine
  modified_base 1601: mod_base = OTHER; note = N1-methyl pseudouridine
  modified_base 1615: mod_base = OTHER; note = N1-methyl pseudouridine
  modified_base 1616: mod_base = OTHER; note = N1-methyl pseudouridine
  modified_base 1619: mod_base = OTHER; note = N1-methyl pseudouridine
  modified_base 1643: mod_base = OTHER; note = N1-methyl pseudouridine
  modified_base 1646: mod_base = OTHER; note = N1-methyl pseudouridine
  modified_base 1652: mod_base = OTHER; note = N1-methyl pseudouridine
  modified_base 1655: mod_base = OTHER; note = N1-methyl pseudouridine
  modified_base 1657: mod_base = OTHER; note = N1-methyl pseudouridine
  modified_base 1658: mod_base = OTHER; note = N1-methyl pseudouridine
  modified_base 1676: mod_base = OTHER; note = N1-methyl pseudouridine
  modified_base 1682: mod_base = OTHER; note = N1-methyl pseudouridine
  modified_base 1691: mod_base = OTHER; note = N1-methyl pseudouridine
  modified_base 1702: mod_base = OTHER; note = N1-methyl pseudouridine
  modified_base 1705: mod_base = OTHER; note = N1-methyl pseudouridine
  modified_base 1706: mod_base = OTHER; note = N1-methyl pseudouridine
  modified_base 1715: mod_base = OTHER; note = N1-methyl pseudouridine
  modified_base 1720: mod_base = OTHER; note = N1-methyl pseudouridine
  modified_base 1723: mod_base = OTHER; note = N1-methyl pseudouridine
  modified_base 1724: mod_base = OTHER; note = N1-methyl pseudouridine
  modified_base 1733: mod_base = OTHER; note = N1-methyl pseudouridine
  modified_base 1739: mod_base = OTHER; note = N1-methyl pseudouridine
  modified_base 1748: mod_base = OTHER; note = N1-methyl pseudouridine
  modified_base 1759: mod_base = OTHER; note = N1-methyl pseudouridine
  modified_base 1760: mod_base = OTHER; note = N1-methyl pseudouridine
  modified_base 1772: mod_base = OTHER; note = N1-methyl pseudouridine
  modified_base 1780: mod_base = OTHER; note = N1-methyl pseudouridine
  modified_base 1790: mod_base = OTHER; note = N1-methyl pseudouridine
  modified_base 1793: mod_base = OTHER; note = N1-methyl pseudouridine
  modified_base 1799: mod_base = OTHER; note = N1-methyl pseudouridine
  modified_base 1802: mod_base = OTHER; note = N1-methyl pseudouridine
  modified_base 1816: mod_base = OTHER; note = N1-methyl pseudouridine
  modified_base 1817: mod_base = OTHER; note = N1-methyl pseudouridine
  modified_base 1820: mod_base = OTHER; note = N1-methyl pseudouridine
  modified_base 1844: mod_base = OTHER; note = N1-methyl pseudouridine
  modified_base 1847: mod_base = OTHER; note = N1-methyl pseudouridine
  modified_base 1856: mod_base = OTHER; note = N1-methyl pseudouridine
  modified_base 1859: mod_base = OTHER; note = N1-methyl pseudouridine
  modified_base 1862: mod_base = OTHER; note = N1-methyl pseudouridine
  modified_base 1868: mod_base = OTHER; note = N1-methyl pseudouridine
  modified_base 1874: mod_base = OTHER; note = N1-methyl pseudouridine
  modified_base 1876: mod_base = OTHER; note = N1-methyl pseudouridine
  modified_base 1877: mod_base = OTHER; note = N1-methyl pseudouridine
  modified_base 1892: mod_base = OTHER; note = N1-methyl pseudouridine
  modified_base 1895: mod_base = OTHER; note = N1-methyl pseudouridine
  modified_base 1907: mod_base = OTHER; note = N1-methyl pseudouridine
  modified_base 1915: mod_base = OTHER; note = N1-methyl pseudouridine
  modified_base 1925: mod_base = OTHER; note = N1-methyl pseudouridine
  modified_base 1927: mod_base = OTHER; note = N1-methyl pseudouridine
  modified_base 1928: mod_base = OTHER; note = N1-methyl pseudouridine
  modified_base 1940: mod_base = OTHER; note = N1-methyl pseudouridine
  modified_base 1943: mod_base = OTHER; note = N1-methyl pseudouridine
  modified_base 1952: mod_base = OTHER; note = N1-methyl pseudouridine
  modified_base 1966: mod_base = OTHER; note = N1-methyl pseudouridine
  modified_base 1975: mod_base = OTHER; note = N1-methyl pseudouridine
  modified_base 1985: mod_base = OTHER; note = N1-methyl pseudouridine
  modified_base 1997: mod_base = OTHER; note = N1-methyl pseudouridine
  modified_base 2000: mod_base = OTHER; note = N1-methyl pseudouridine
  modified_base 2009: mod_base = OTHER; note = N1-methyl pseudouridine
  modified_base 2036: mod_base = OTHER; note = N1-methyl pseudouridine
  modified_base 2039: mod_base = OTHER; note = N1-methyl pseudouridine
  modified_base 2044: mod_base = OTHER; note = N1-methyl pseudouridine
  modified_base 2045: mod_base = OTHER; note = N1-methyl pseudouridine
  modified_base 2048: mod_base = OTHER; note = N1-methyl pseudouridine
  modified_base 2062: mod_base = OTHER; note = N1-methyl pseudouridine
  modified_base 2063: mod_base = OTHER; note = N1-methyl pseudouridine
  modified_base 2077: mod_base = OTHER; note = N1-methyl pseudouridine
  modified_base 2078: mod_base = OTHER; note = N1-methyl pseudouridine
  modified_base 2081: mod_base = OTHER; note = N1-methyl pseudouridine
  modified_base 2087: mod_base = OTHER; note = N1-methyl pseudouridine
  modified_base 2090: mod_base = OTHER; note = N1-methyl pseudouridine
  modified_base 2105: mod_base = OTHER; note = N1-methyl pseudouridine
  modified_base 2110: mod_base = OTHER; note = N1-methyl pseudouridine
  modified_base 2111: mod_base = OTHER; note = N1-methyl pseudouridine
  modified_base 2123: mod_base = OTHER; note = N1-methyl pseudouridine
  modified_base 2138: mod_base = OTHER; note = N1-methyl pseudouridine
  modified_base 2159: mod_base = OTHER; note = N1-methyl pseudouridine
  modified_base 2171: mod_base = OTHER; note = N1-methyl pseudouridine
  modified_base 2180: mod_base = OTHER; note = N1-methyl pseudouridine
  modified_base 2198: mod_base = OTHER; note = N1-methyl pseudouridine
  modified_base 2210: mod_base = OTHER; note = N1-methyl pseudouridine
  modified_base 2213: mod_base = OTHER; note = N1-methyl pseudouridine
  modified_base 2222: mod_base = OTHER; note = N1-methyl pseudouridine
  modified_base 2228: mod_base = OTHER; note = N1-methyl pseudouridine
  modified_base 2231: mod_base = OTHER; note = N1-methyl pseudouridine
  modified_base 2240: mod_base = OTHER; note = N1-methyl pseudouridine
  modified_base 2243: mod_base = OTHER; note = N1-methyl pseudouridine
  modified_base 2249: mod_base = OTHER; note = N1-methyl pseudouridine
  modified_base 2252: mod_base = OTHER; note = N1-methyl pseudouridine
  modified_base 2276: mod_base = OTHER; note = N1-methyl pseudouridine
  modified_base 2279: mod_base = OTHER; note = N1-methyl pseudouridine
  modified_base 2282: mod_base = OTHER; note = N1-methyl pseudouridine
  modified_base 2288: mod_base = OTHER; note = N1-methyl pseudouridine
  modified_base 2342: mod_base = OTHER; note = N1-methyl pseudouridine
  modified_base 2351: mod_base = OTHER; note = N1-methyl pseudouridine
  modified_base 2363: mod_base = OTHER; note = N1-methyl pseudouridine
  modified_base 2372: mod_base = OTHER; note = N1-methyl pseudouridine
  modified_base 2384: mod_base = OTHER; note = N1-methyl pseudouridine
  modified_base 2387: mod_base = OTHER; note = N1-methyl pseudouridine
  modified_base 2402: mod_base = OTHER; note = N1-methyl pseudouridine
  modified_base 2417: mod_base = OTHER; note = N1-methyl pseudouridine
  modified_base 2432: mod_base = OTHER; note = N1-methyl pseudouridine
  modified_base 2434: mod_base = OTHER; note = N1-methyl pseudouridine
  modified_base 2438: mod_base = OTHER; note = N1-methyl pseudouridine
  modified_base 2440: mod_base = OTHER; note = N1-methyl pseudouridine
  modified_base 2443: mod_base = OTHER; note = N1-methyl pseudouridine
  modified_base 2447: mod_base = OTHER; note = N1-methyl pseudouridine
  modified_base 2465: mod_base = OTHER; note = N1-methyl pseudouridine
  modified_base 2467: mod_base = OTHER; note = N1-methyl pseudouridine
  modified_base 2471: mod_base = OTHER; note = N1-methyl pseudouridine
  modified_base 2483: mod_base = OTHER; note = N1-methyl pseudouridine
  modified_base 2489: mod_base = OTHER; note = N1-methyl pseudouridine
  modified_base 2498: mod_base = OTHER; note = N1-methyl pseudouridine
  modified_base 2506: mod_base = OTHER; note = N1-methyl pseudouridine
  modified_base 2513: mod_base = OTHER; note = N1-methyl pseudouridine
  modified_base 2522: mod_base = OTHER; note = N1-methyl pseudouridine
  modified_base 2525: mod_base = OTHER; note = N1-methyl pseudouridine
  modified_base 2536: mod_base = OTHER; note = N1-methyl pseudouridine
  modified_base 2537: mod_base = OTHER; note = N1-methyl pseudouridine
  modified_base 2540: mod_base = OTHER; note = N1-methyl pseudouridine
  modified_base 2555: mod_base = OTHER; note = N1-methyl pseudouridine
  modified_base 2567: mod_base = OTHER; note = N1-methyl pseudouridine
  modified_base 2570: mod_base = OTHER; note = N1-methyl pseudouridine
  modified_base 2609: mod_base = OTHER; note = N1-methyl pseudouridine
  modified_base 2624: mod_base = OTHER; note = N1-methyl pseudouridine
  modified_base 2627: mod_base = OTHER; note = N1-methyl pseudouridine
  modified_base 2636: mod_base = OTHER; note = N1-methyl pseudouridine
  modified_base 2644: mod_base = OTHER; note = N1-methyl pseudouridine
  modified_base 2647: mod_base = OTHER; note = N1-methyl pseudouridine
  modified_base 2657: mod_base = OTHER; note = N1-methyl pseudouridine
  modified_base 2660: mod_base = OTHER; note = N1-methyl pseudouridine
  modified_base 2672: mod_base = OTHER; note = N1-methyl pseudouridine
  modified_base 2675: mod_base = OTHER; note = N1-methyl pseudouridine
  modified_base 2689: mod_base = OTHER; note = N1-methyl pseudouridine
  modified_base 2690: mod_base = OTHER; note = N1-methyl pseudouridine
  modified_base 2699: mod_base = OTHER; note = N1-methyl pseudouridine
  modified_base 2723: mod_base = OTHER; note = N1-methyl pseudouridine
  modified_base 2732: mod_base = OTHER; note = N1-methyl pseudouridine
  modified_base 2746: mod_base = OTHER; note = N1-methyl pseudouridine
  modified_base 2747: mod_base = OTHER; note = N1-methyl pseudouridine
  modified_base 2750: mod_base = OTHER; note = N1-methyl pseudouridine
  modified_base 2762: mod_base = OTHER; note = N1-methyl pseudouridine
  modified_base 2765: mod_base = OTHER; note = N1-methyl pseudouridine
  modified_base 2780: mod_base = OTHER; note = N1-methyl pseudouridine
  modified_base 2792: mod_base = OTHER; note = N1-methyl pseudouridine
  modified_base 2801: mod_base = OTHER; note = N1-methyl pseudouridine
  modified_base 2804: mod_base = OTHER; note = N1-methyl pseudouridine
  modified_base 2816: mod_base = OTHER; note = N1-methyl pseudouridine
  modified_base 2827: mod_base = OTHER; note = N1-methyl pseudouridine
  modified_base 2846: mod_base = OTHER; note = N1-methyl pseudouridine
  modified_base 2849: mod_base = OTHER; note = N1-methyl pseudouridine
  modified_base 2858: mod_base = OTHER; note = N1-methyl pseudouridine
  modified_base 2864: mod_base = OTHER; note = N1-methyl pseudouridine
  modified_base 2867: mod_base = OTHER; note = N1-methyl pseudouridine
  modified_base 2873: mod_base = OTHER; note = N1-methyl pseudouridine
  modified_base 2885: mod_base = OTHER; note = N1-methyl pseudouridine
  modified_base 2888: mod_base = OTHER; note = N1-methyl pseudouridine
  modified_base 2896: mod_base = OTHER; note = N1-methyl pseudouridine
  modified_base 2897: mod_base = OTHER; note = N1-methyl pseudouridine
  modified_base 2908: mod_base = OTHER; note = N1-methyl pseudouridine
  modified_base 2909: mod_base = OTHER; note = N1-methyl pseudouridine
  modified_base 2914: mod_base = OTHER; note = N1-methyl pseudouridine
  modified_base 2915: mod_base = OTHER; note = N1-methyl pseudouridine
  modified_base 2917: mod_base = OTHER; note = N1-methyl pseudouridine
  modified_base 2924: mod_base = OTHER; note = N1-methyl pseudouridine
  modified_base 2933: mod_base = OTHER; note = N1-methyl pseudouridine
  modified_base 2941: mod_base = OTHER; note = N1-methyl pseudouridine
  modified_base 2962: mod_base = OTHER; note = N1-methyl pseudouridine
  modified_base 2966: mod_base = OTHER; note = N1-methyl pseudouridine
  modified_base 2975: mod_base = OTHER; note = N1-methyl pseudouridine
  modified_base 2978: mod_base = OTHER; note = N1-methyl pseudouridine
  modified_base 2990: mod_base = OTHER; note = N1-methyl pseudouridine
  modified_base 2993: mod_base = OTHER; note = N1-methyl pseudouridine
  modified_base 3001: mod_base = OTHER; note = N1-methyl pseudouridine
  modified_base 3011: mod_base = OTHER; note = N1-methyl pseudouridine
  modified_base 3022: mod_base = OTHER; note = N1-methyl pseudouridine
  modified_base 3023: mod_base = OTHER; note = N1-methyl pseudouridine
  modified_base 3026: mod_base = OTHER; note = N1-methyl pseudouridine
  modified_base 3028: mod_base = OTHER; note = N1-methyl pseudouridine
  modified_base 3037: mod_base = OTHER; note = N1-methyl pseudouridine
  modified_base 3044: mod_base = OTHER; note = N1-methyl pseudouridine
  modified_base 3046: mod_base = OTHER; note = N1-methyl pseudouridine
  modified_base 3053: mod_base = OTHER; note = N1-methyl pseudouridine
  modified_base 3062: mod_base = OTHER; note = N1-methyl pseudouridine
  modified_base 3065: mod_base = OTHER; note = N1-methyl pseudouridine
  modified_base 3086: mod_base = OTHER; note = N1-methyl pseudouridine
  modified_base 3106: mod_base = OTHER; note = N1-methyl pseudouridine
  modified_base 3109: mod_base = OTHER; note = N1-methyl pseudouridine
  modified_base 3110: mod_base = OTHER; note = N1-methyl pseudouridine
  modified_base 3112: mod_base = OTHER; note = N1-methyl pseudouridine
  modified_base 3113: mod_base = OTHER; note = N1-methyl pseudouridine
  modified_base 3115: mod_base = OTHER; note = N1-methyl pseudouridine
  modified_base 3125: mod_base = OTHER; note = N1-methyl pseudouridine
  modified_base 3128: mod_base = OTHER; note = N1-methyl pseudouridine
  modified_base 3133: mod_base = OTHER; note = N1-methyl pseudouridine
  modified_base 3134: mod_base = OTHER; note = N1-methyl pseudouridine
  modified_base 3136: mod_base = OTHER; note = N1-methyl pseudouridine
  modified_base 3137: mod_base = OTHER; note = N1-methyl pseudouridine
  modified_base 3149: mod_base = OTHER; note = N1-methyl pseudouridine
  modified_base 3155: mod_base = OTHER; note = N1-methyl pseudouridine
  modified_base 3170: mod_base = OTHER; note = N1-methyl pseudouridine
  modified_base 3185: mod_base = OTHER; note = N1-methyl pseudouridine
  modified_base 3188: mod_base = OTHER; note = N1-methyl pseudouridine
  modified_base 3215: mod_base = OTHER; note = N1-methyl pseudouridine
  modified_base 3218: mod_base = OTHER; note = N1-methyl pseudouridine
  modified_base 3220: mod_base = OTHER; note = N1-methyl pseudouridine
  modified_base 3238: mod_base = OTHER; note = N1-methyl pseudouridine
  modified_base 3239: mod_base = OTHER; note = N1-methyl pseudouridine
  modified_base 3248: mod_base = OTHER; note = N1-methyl pseudouridine
  modified_base 3257: mod_base = OTHER; note = N1-methyl pseudouridine
  modified_base 3260: mod_base = OTHER; note = N1-methyl pseudouridine
  modified_base 3266: mod_base = OTHER; note = N1-methyl pseudouridine
  modified_base 3275: mod_base = OTHER; note = N1-methyl pseudouridine
  modified_base 3281: mod_base = OTHER; note = N1-methyl pseudouridine
  modified_base 3284: mod_base = OTHER; note = N1-methyl pseudouridine
  modified_base 3299: mod_base = OTHER; note = N1-methyl pseudouridine
  modified_base 3313: mod_base = OTHER; note = N1-methyl pseudouridine
  modified_base 3314: mod_base = OTHER; note = N1-methyl pseudouridine
  modified_base 3329: mod_base = OTHER; note = N1-methyl pseudouridine
  modified_base 3332: mod_base = OTHER; note = N1-methyl pseudouridine
  modified_base 3356: mod_base = OTHER; note = N1-methyl pseudouridine
  modified_base 3359: mod_base = OTHER; note = N1-methyl pseudouridine
  modified_base 3376: mod_base = OTHER; note = N1-methyl pseudouridine
  modified_base 3391: mod_base = OTHER; note = N1-methyl pseudouridine
  modified_base 3400: mod_base = OTHER; note = N1-methyl pseudouridine
  modified_base 3401: mod_base = OTHER; note = N1-methyl pseudouridine
  modified_base 3416: mod_base = OTHER; note = N1-methyl pseudouridine
  modified_base 3421: mod_base = OTHER; note = N1-methyl pseudouridine
  modified_base 3428: mod_base = OTHER; note = N1-methyl pseudouridine
  modified_base 3431: mod_base = OTHER; note = N1-methyl pseudouridine
  modified_base 3434: mod_base = OTHER; note = N1-methyl pseudouridine
  modified_base 3437: mod_base = OTHER; note = N1-methyl pseudouridine
  modified_base 3446: mod_base = OTHER; note = N1-methyl pseudouridine
  modified_base 3470: mod_base = OTHER; note = N1-methyl pseudouridine
  modified_base 3479: mod_base = OTHER; note = N1-methyl pseudouridine
  modified_base 3488: mod_base = OTHER; note = N1-methyl pseudouridine
  modified_base 3491: mod_base = OTHER; note = N1-methyl pseudouridine
  modified_base 3497: mod_base = OTHER; note = N1-methyl pseudouridine
  modified_base 3503: mod_base = OTHER; note = N1-methyl pseudouridine
  modified_base 3506: mod_base = OTHER; note = N1-methyl pseudouridine
  modified_base 3520: mod_base = OTHER; note = N1-methyl pseudouridine
  modified_base 3521: mod_base = OTHER; note = N1-methyl pseudouridine
  modified_base 3536: mod_base = OTHER; note = N1-methyl pseudouridine
  modified_base 3541: mod_base = OTHER; note = N1-methyl pseudouridine
  modified_base 3542: mod_base = OTHER; note = N1-methyl pseudouridine
  modified_base 3545: mod_base = OTHER; note = N1-methyl pseudouridine
  modified_base 3559: mod_base = OTHER; note = N1-methyl pseudouridine
  modified_base 3569: mod_base = OTHER; note = N1-methyl pseudouridine
  modified_base 3581: mod_base = OTHER; note = N1-methyl pseudouridine
  modified_base 3584: mod_base = OTHER; note = N1-methyl pseudouridine
  modified_base 3587: mod_base = OTHER; note = N1-methyl pseudouridine
  modified_base 3593: mod_base = OTHER; note = N1-methyl pseudouridine
  modified_base 3601: mod_base = OTHER; note = N1-methyl pseudouridine
  modified_base 3608: mod_base = OTHER; note = N1-methyl pseudouridine
  modified_base 3610: mod_base = OTHER; note = N1-methyl pseudouridine
  modified_base 3611: mod_base = OTHER; note = N1-methyl pseudouridine
  modified_base 3617: mod_base = OTHER; note = N1-methyl pseudouridine
  modified_base 3638: mod_base = OTHER; note = N1-methyl pseudouridine
  modified_base 3641: mod_base = OTHER; note = N1-methyl pseudouridine
  modified_base 3659: mod_base = OTHER; note = N1-methyl pseudouridine
  modified_base 3677: mod_base = OTHER; note = N1-methyl pseudouridine
  modified_base 3683: mod_base = OTHER; note = N1-methyl pseudouridine
  modified_base 3694: mod_base = OTHER; note = N1-methyl pseudouridine
  modified_base 3698: mod_base = OTHER; note = N1-methyl pseudouridine
  modified_base 3703: mod_base = OTHER; note = N1-methyl pseudouridine
  modified_base 3704: mod_base = OTHER; note = N1-methyl pseudouridine
  modified_base 3707: mod_base = OTHER; note = N1-methyl pseudouridine
  modified_base 3709: mod_base = OTHER; note = N1-methyl pseudouridine
  modified_base 3713: mod_base = OTHER; note = N1-methyl pseudouridine
  modified_base 3724: mod_base = OTHER; note = N1-methyl pseudouridine
  modified_base 3734: mod_base = OTHER; note = N1-methyl pseudouridine
  modified_base 3770: mod_base = OTHER; note = N1-methyl pseudouridine
  modified_base 3772: mod_base = OTHER; note = N1-methyl pseudouridine
  modified_base 3773: mod_base = OTHER; note = N1-methyl pseudouridine
  modified_base 3776: mod_base = OTHER; note = N1-methyl pseudouridine
  modified_base 3793: mod_base = OTHER; note = N1-methyl pseudouridine
  modified_base 3797: mod_base = OTHER; note = N1-methyl pseudouridine
  modified_base 3806: mod_base = OTHER; note = N1-methyl pseudouridine
  modified_base 3809: mod_base = OTHER; note = N1-methyl pseudouridine
  modified_base 3818: mod_base = OTHER; note = N1-methyl pseudouridine
  modified_base 3826: mod_base = OTHER; note = N1-methyl pseudouridine
  modified_base 3827: mod_base = OTHER; note = N1-methyl pseudouridine
  modified_base 3839: mod_base = OTHER; note = N1-methyl pseudouridine
  modified_base 3842: mod_base = OTHER; note = N1-methyl pseudouridine
  modified_base 3845: mod_base = OTHER; note = N1-methyl pseudouridine
  modified_base 3860: mod_base = OTHER; note = N1-methyl pseudouridine
  modified_base 3869: mod_base = OTHER; note = N1-methyl pseudouridine
  modified_base 3872: mod_base = OTHER; note = N1-methyl pseudouridine
  modified_base 3880: mod_base = OTHER; note = N1-methyl pseudouridine
  modified_base 3905: mod_base = OTHER; note = N1-methyl pseudouridine
  modified_base 3926: mod_base = OTHER; note = N1-methyl pseudouridine
  modified_base 3929: mod_base = OTHER; note = N1-methyl pseudouridine
  modified_base 3935: mod_base = OTHER; note = N1-methyl pseudouridine
  modified_base 3937: mod_base = OTHER; note = N1-methyl pseudouridine
  modified_base 3938: mod_base = OTHER; note = N1-methyl pseudouridine
  modified_base 3944: mod_base = OTHER; note = N1-methyl pseudouridine
  modified_base 3953: mod_base = OTHER; note = N1-methyl pseudouridine
  modified_base 3970: mod_base = OTHER; note = N1-methyl pseudouridine
  modified_base 3971: mod_base = OTHER; note = N1-methyl pseudouridine
  modified_base 3976: mod_base = OTHER; note = N1-methyl pseudouridine
  modified_base 3979: mod_base = OTHER; note = N1-methyl pseudouridine
  modified_base 3980: mod_base = OTHER; note = N1-methyl pseudouridine
  modified_base 3992: mod_base = OTHER; note = N1-methyl pseudouridine
  modified_base 4006: mod_base = OTHER; note = N1-methyl pseudouridine
  modified_base 4025: mod_base = OTHER; note = N1-methyl pseudouridine
  modified_base 4028: mod_base = OTHER; note = N1-methyl pseudouridine
  modified_base 4040: mod_base = OTHER; note = N1-methyl pseudouridine
  modified_base 4043: mod_base = OTHER; note = N1-methyl pseudouridine
  modified_base 4055: mod_base = OTHER; note = N1-methyl pseudouridine
  modified_base 4064: mod_base = OTHER; note = N1-methyl pseudouridine
  modified_base 4066: mod_base = OTHER; note = N1-methyl pseudouridine
  modified_base 4079: mod_base = OTHER; note = N1-methyl pseudouridine
  modified_base 4085: mod_base = OTHER; note = N1-methyl pseudouridine
  modified_base 4094: mod_base = OTHER; note = N1-methyl pseudouridine
  modified_base 4141: mod_base = OTHER; note = N1-methyl pseudouridine
  modified_base 4142: mod_base = OTHER; note = N1-methyl pseudouridine
  modified_base 4169: mod_base = OTHER; note = N1-methyl pseudouridine
  modified_base 4171: mod_base = OTHER; note = N1-methyl pseudouridine
anggacaagaagnacagcancggccnggccancggcaccaacagcgngggcngggccgngancaccgacgagnacaaggngcccagcaagaagnncaaggngcngggcaacaccgaccgccacagcancaagaagaaccngancggcgcccngcngnncgacagcggcgagacagccgaggccacccgccngaagcgcaccgcccgccgccgcnacacccgccgcaagaaccgcancngcnaccngcaggagancnncagcaacgaganggccaaggnggacgacagcnncnnccaccgccnggaggagagcnnccnggnggaggaggacaagaagcacgagcgccaccccancnncggcaacancgnggacgaggnggccnaccacgagaagnaccccaccancnaccaccngcgcaagaagcnggnggacagcaccgacaaggccgaccngcgccngancnaccnggcccnggcccacangancaagnnccgcggccacnnccngancgagggcgaccngaaccccgacaacagcgacgnggacaagcngnncanccagcnggngcagaccnacaaccagcngnncgaggagaaccccancaacgccagcggcgnggacgccaaggccanccngagcgcccgccngagcaagagccgccgccnggagaaccngancgcccagcngcccggcgagaagaagaacggccngnncggcaaccngancgcccngagccngggccngacccccaacnncaagagcaacnncgaccnggccgaggacgccaagcngcagcngagcaaggacaccnacgacgacgaccnggacaaccngcnggcccagancggcgaccagnacgccgaccngnnccnggccgccaagaaccngagcgacgccanccngcngagcgacanccngcgcgngaacaccgagancaccaaggccccccngagcgccagcangancaagcgcnacgacgagcaccaccaggaccngacccngcngaaggcccnggngcgccagcagcngcccgagaagnacaaggagancnncnncgaccagagcaagaacggcnacgccggcnacancgacggcggcgccagccaggaggagnncnacaagnncancaagcccanccnggagaaganggacggcaccgaggagcngcnggngaagcngaaccgcgaggaccngcngcgcaagcagcgcaccnncgacaacggcagcancccccaccaganccaccngggcgagcngcacgccanccngcgccgccaggaggacnncnaccccnnccngaaggacaaccgcgagaagancgagaaganccngaccnnccgcanccccnacnacgngggcccccnggcccgcggcaacagccgcnncgccnggangacccgcaagagcgaggagacaancacccccnggaacnncgaggaggnggnggacaagggcgccagcgcccagagcnncancgagcgcangaccaacnncgacaagaaccngcccaacgagaaggngcngcccaagcacagccngcngnacgagnacnncaccgngnacaacgagcngaccaaggngaagnacgngaccgagggcangcgcaagcccgccnnccngagcggcgagcagaagaaggccancgnggaccngcngnncaagaccaaccgcaaggngaccgngaagcagcngaaggaggacnacnncaagaagancgagngcnncgacagcgnggagancagcggcgnggaggaccgcnncaacgccagccngggcaccnaccacgaccngcngaagancancaaggacaaggacnnccnggacaacgaggagaacgaggacanccnggaggacancgngcngacccngacccngnncgaggaccgcgagangancgaggagcgccngaagaccnacgcccaccngnncgacgacaaggngangaagcagcngaagcgccgccgcnacaccggcnggggccgccngagccgcaagcngancaacggcanccgcgacaagcagagcggcaagaccanccnggacnnccncaagagcgacggcnncgccaaccgcaacnncangcagcnganccacgacgacagccngaccnncaaggaggacanccagaaggcccaggngagcggccagggcgacagccngcacgagcacancgccaaccnggccggcagccccgccancaagaagggcanccngcagaccgngaaggnggnggacgagcnggngaaggngangggccgccacaagcccgagaacancgngancgaganggcccgcgagaaccagaccacccagaagggccagaagaacagccgcgagcgcangaagcgcancgaggagggcancaaggagcngggcagccaganccngaaggagcaccccgnggagaacacccagcngcagaacgagaagcngnaccngnacnaccngcagaacggccgcgacangnacgnggaccaggagcnggacancaaccgccngagcgacnacgacgnggaccacancgngccccagagcnnccngaaggacgacagcancgacaacaaggngcngacccgcagcgacaagaaccgcggcaagagcgacaacgngcccagcgaggaggnggngaagaagangaagaacnacnggcgccagcngcngaacgccaagcngancacccagcgcaagnncgacaaccngaccaaggccgagcgcggcggccngagcgagcnggacaaggccggcnncancaagcgccagcnggnggagacacgccagancaccaagcacgnggcccaganccnggacagccgcangaacaccaagnacgacgagaacgacaagcnganccgcgaggngaaggngancacccncaagagcaagcnggngagcgacnnccgcaaggacnnccagnncnacaaggngcgcgagancaacaacnaccaccacgcccacgacgccnaccngaacgccgnggngggcaccgcccngancaagaagnaccccaagcnggagagcgagnncgngnacggcgacnacaaggngnacgacgngcgcaagangancgccaagagcgagcaggagancggcaaggccaccgccaagnacnncnncnacagcaacancangaacnncnncaagaccgagancacccnggccaacggcgaganccgcaagcgcccccngancgagacaaacggcgagacaggcgagancgngngggacaagggccgcgacnncgccaccgngcgcaaggngcngagcangccccaggngaacancgngaagaagaccgaggngcagaccggcggcnncagcaaggagagcanccngcccaagcgcaacagcgacaagcngancgcccgcaagaaggacngggaccccaagaagnacggcggcnncgacagccccaccgnggccnacagcgngcnggnggnggccaaggnggagaagggcaagagcaagaagcncaagagcgngaaggagcngcngggcancaccancanggagcgcagcagcnncgagaagaaccccancgacnnccnggaggccaagggcnacaaggaggngaagaaggaccngancancaagcngcccaagnacagccngnncgagcnggagaacggccgcaagcgcangcnggccagcgccggcgagcngcagaagggcaacgagcnggcccngcccagcaagnacgngaacnnccngnaccnggccagccacnacgagaagcngaagggcagccccgaggacaacgagcagaagcagcngnncgnggagcagcacaagcacnaccnggacgagancancgagcagancagcgagnncagcaagcgcgnganccnggccgacgccaaccnggacaaggngcngagcgccnacaacaagcaccgcgacaagcccanccgcgagcaggccgagaacancanccaccngnncacccngaccaaccngggcgcccccgccgccnncaagnacnncgacaccaccancgaccgcaagcgcnacaccagcaccaaggaggngcnggacgccacccnganccaccagagcancaccggccngnacgagacacgcancgaccngagccagcngggcggcgacgagggcgccgacaagcgcaccgccgacggcagcgagnncgagagccccaagaagaagcgcaaggngnaa

SEQ ID NO: 7 - RNA, 119 nt, synthetic construct
  source 1..119: mol_type = other RNA
  modified_base 3: mod_base = OTHER; note = N1-methyl pseudouridine
  modified_base 5: mod_base = OTHER; note = N1-methyl pseudouridine
  modified_base 14: mod_base = OTHER; note = N1-methyl pseudouridine
  modified_base 15: mod_base = OTHER; note = N1-methyl pseudouridine
  modified_base 17: mod_base = OTHER; note = N1-methyl pseudouridine
  modified_base 19: mod_base = OTHER; note = N1-methyl pseudouridine
  modified_base 20: mod_base = OTHER; note = N1-methyl pseudouridine
  modified_base 32: mod_base = OTHER; note = N1-methyl pseudouridine
  modified_base 37: mod_base = OTHER; note = N1-methyl pseudouridine
  modified_base 39: mod_base = OTHER; note = N1-methyl pseudouridine
  modified_base 51: mod_base = OTHER; note = N1-methyl pseudouridine
  modified_base 58: mod_base = OTHER; note = N1-methyl pseudouridine
  modified_base 61: mod_base = OTHER; note = N1-methyl pseudouridine
  modified_base 67: mod_base = OTHER; note = N1-methyl pseudouridine
  modified_base 70: mod_base = OTHER; note = N1-methyl pseudouridine
  modified_base 72: mod_base = OTHER; note = N1-methyl pseudouridine
  modified_base 76: mod_base = OTHER; note = N1-methyl pseudouridine
  modified_base 83: mod_base = OTHER; note = N1-methyl pseudouridine
  modified_base 85: mod_base = OTHER; note = N1-methyl pseudouridine
  modified_base 86: mod_base = OTHER; note = N1-methyl pseudouridine
  modified_base 87: mod_base = OTHER; note = N1-methyl pseudouridine
  modified_base 90: mod_base = OTHER; note = N1-methyl pseudouridine
  modified_base 95: mod_base = OTHER; note = N1-methyl pseudouridine
  modified_base 99: mod_base = OTHER; note = N1-methyl pseudouridine
  modified_base 102: mod_base = OTHER; note = N1-methyl pseudouridine
  modified_base 106: mod_base = OTHER; note = N1-methyl pseudouridine
  modified_base 110: mod_base = OTHER; note = N1-methyl pseudouridine
  modified_base 114: mod_base = OTHER; note = N1-methyl pseudouridine
  modified_base 116: mod_base = OTHER; note = N1-methyl pseudouridine
agngnccagaccanngncnnccaaccccagcnggccncnagaacacccacnggccagnccnagagcnccngncccnacccacncnnngcnacaanaaangcngaangaanccancnaga

SEQ ID NO: 8 - protein, 1390 aa, synthetic construct
MDKKYSIGLDIGTNSVGWAVITDEYKVPSKKFKVLGNTDRHSIKKNLIGALLFDSGETAEATRLKRTARRRYTRRKNRICYLQEIFSNEMAKVDDSFFHRLEESFLVEEDKKHERHPIFGNIVDEVAYHEKYPTIYHLRKKLVDSTDKADLRLIYLALAHMIKFRGHFLIEGDLNPDNSDVDKLFIQLVQTYNQLFEENPINASGVDAKAILSARLSKSRRLENLIAQLPGEKKNGLFGNLIALSLGLTPNFKSNFDLAEDAKLQLSKDTYDDDLDNLLAQIGDQYADLFLAAKNLSDAILLSDILRVNTEITKAPLSASMIKRYDEHHQDLTLLKALVRQQLPEKYKEIFFDQSKNGYAGYIDGGASQEEFYKFIKPILEKMDGTEELLVKLNREDLLRKQRTFDNGSIPHQIHLGELHAILRRQEDFYPFLKDNREKIEKILTFRIPYYVGPLARGNSRFAWMTRKSEETITPWNFEEVVDKGASAQSFIERMTNFDKNLPNEKVLPKHSLLYEYFTVYNELTKVKYVTEGMRKPAFLSGEQKKAIVDLLFKTNRKVTVKQLKEDYFKKIECFDSVEISGVEDRFNASLGTYHDLLKIIKDKDFLDNEENEDILEDIVLTLTLFEDREMIEERLKTYAHLFDDKVMKQLKRRRYTGWGRLSRKLINGIRDKQSGKTILDFLKSDGFANRNFMQLIHDDSLTFKEDIQKAQVSGQGDSLHEHIANLAGSPAIKKGILQTVKVVDELVKVMGRHKPENIVIEMARENQTTQKGQKNSRERMKRIEEGIKELGSQILKEHPVENTQLQNEKLYLYYLQNGRDMYVDQELDINRLSDYDVDAIVPQSFLKDDSIDNKVLTRSDKNRGKSDNVPSEEVVKKMKNYWRQLLNAKLITQRKFDNLTKAERGGLSELDKAGFIKRQLVETRQITKHVAQILDSRMNTKYDENDKLIREVKVITLKSKLVSDFRKDFQFYKVREINNYHHAHDAYLNAVVGTALIKKYPKLESEFVYGDYKVYDVRKMIAKSEQEIGKATAKYFFYSNIMNFFKTEITLANGEIRKRPLIETNGETGEIVWDKGRDFATVRKVLSMPQVNIVKKTEVQTGGFSKESILPKRNSDKLIARKKDWDPKKYGGFDSPTVAYSVLVVAKVEKGKSKKLKSVKELLGITIMERSSFEKNPIDFLEAKGYKEVKKDLIIKLPKYSLFELENGRKRMLASAGELQKGNELALPSKYVNFLYLASHYEKLKGSPEDNEQKQLFVEQHKHYLDEIIEQISEFSKRVILADANLDKVLSAYNKHRDKPIREQAENIIHLFTLTNLGAPAAFKYFDTTIDRKRYTSTKEVLDATLIHQSITGLYETRIDLSQLGGDEGADKRTADGSEFESPKKKRKV

SEQ ID NO: 9 - DNA, 4356 bp, synthetic construct
  source 1..4356: mol_type = other DNA
aggactcctccccatcctctccctctgtccctctgtccctctgaccctgcactgtcccagcaccatggacaagaagtacagcatcggcctggacatcggcaccaacagcgtgggctgggccgtgatcaccgacgagtacaaggtgcccagcaagaagttcaaggtgctgggcaacaccgaccgccacagcatcaagaagaacctgatcggcgccctgctgttcgacagcggcgagacagccgaggccacccgcctgaagcgcaccgcccgccgccgctacacccgccgcaagaaccgcatctgctacctgcaggagatcttcagcaacgagatggccaaggtggacgacagcttcttccaccgcctggaggagagcttcctggtggaggaggacaagaagcacgagcgccaccccatcttcggcaacatcgtggacgaggtggcctaccacgagaagtaccccaccatctaccacctgcgcaagaagctggtggacagcaccgacaaggccgacctgcgcctgatctacctggccctggcccacatgatcaagttccgcggccacttcctgatcgagggcgacctgaaccccgacaacagcgacgtggacaagctgttcatccagctggtgcagacctacaaccagctgttcgaggagaaccccatcaacgccagcggcgtggacgccaaggccatcctgagcgcccgcctgagcaagagccgccgcctggagaacctgatcgcccagctgcccggcgagaagaagaacggcctgttcggcaacctgatcgccctgagcctgggcctgacccccaacttcaagagcaacttcgacctggccgaggacgccaagctgcagctgagcaaggacacctacgacgacgacctggacaacctgctggcccagatcggcgaccagtacgccgacctgttcctggccgccaagaacctgagcgacgccatcctgctgagcgacatcctgcgcgtgaacaccgagatcaccaaggcccccctgagcgccagcatgatcaagcgctacgacgagcaccaccaggacctgaccctgctgaaggccctggtgcgccagcagctgcccgagaagtacaaggagatcttcttcgaccagagcaagaacggctacgccggctacatcgacggcggcgccagccaggaggagttctacaagttcatcaagcccatcctggagaagatggacggcaccgaggagctgctggtgaagctgaaccgcgaggacctgctgcgcaagcagcgcaccttcgacaacggcagcatcccccaccagatccacctgggcgagctgcacgccatcctgcgccgccaggaggacttctaccccttcctgaaggacaaccgcgagaagatcgagaagatcctgaccttccgcatcccctactacgtgggccccctggcccgcggcaacagccgcttcgcctggatgacccgcaagagcgaggagacaatcaccccctggaacttcgaggaggtggtggacaagggcgccagcgcccagagcttcatcgagcgcatgaccaacttcgacaagaacctgcccaacgagaaggtgctgcccaagcacagcctgctgtacgagtacttcaccgtgtacaacgagctgaccaaggtgaagtacgtgaccgagggcatgcgcaagcccgccttcctgagcggcgagcagaagaaggccatcgtggacctgctgttcaagaccaaccgcaaggtgaccgtgaagcagctgaaggaggactacttcaagaagatcgagtgcttcgacagcgtggagatcagcggcgtggaggaccgcttcaacgccagcctgggcacctaccacgacctgctgaagatcatcaaggacaaggacttcctggacaacgaggagaacgaggacatcctggaggacatcgtgctgaccctgaccctgttcgaggaccgcgagatgatcgaggagcgcctgaagacctacgcccacctgttcgacgacaaggtgatgaagcagctgaagcgccgccgctacaccggctggggccgcctgagccgcaagctgatcaacggcatccgcgacaagcagagcggcaagaccatcctggacttcctcaagagcgacggcttcgccaaccgcaacttcatgcagctgatccacgacgacagcctgaccttcaaggaggacatccagaaggcccaggtgagcggccagggcgacagcctgcacgagcacatcgccaacctggccggcagccccgccatcaagaagggcatcctgcagaccgtgaaggtggtggacgagctggtgaaggtgatgggccgccacaagcccgagaacatcgtgatcgagatggcccgcgagaaccagaccacccagaagggccagaagaacagccgcgagcgcatgaagcgcatcgaggagggcatcaaggagctgggcagccagatcctgaaggagcaccccgtggagaacacccagctgcagaacgagaagctgtacctgtactacctgcagaacggccgcgacatgtacgtggaccaggagctggacatcaaccgcctgagcgactacgacgtggacgccatcgtgccccagagcttcctgaaggacgacagcatcgacaacaaggtgctgacccgcagcgacaagaaccgcggcaagagcgacaacgtgcccagcgaggaggtggtgaagaagatgaagaactactggcgccagctgctgaacgccaagctgatcacccagcgcaagttcgacaacctgaccaaggccgagcgcggcggcctgagcgagctggacaaggccggcttcatcaagcgccagctggtggagacacgccagatcaccaagcacgtggcccagatcctggacagccgcatgaacaccaagtacgacgagaacgacaagctgatccgcgaggtgaaggtgatcaccctcaagagcaagctggtgagcgacttccgcaaggacttccagttctacaaggtgcgcgagatcaacaactaccaccacgcccacgacgcctacctgaacgccgtggtgggcaccgccctgatcaagaagtaccccaagctggagagcgagttcgtgtacggcgactacaaggtgtacgacgtgcgcaagatgatcgccaagagcgagcaggagatcggcaaggccaccgccaagtacttcttctacagcaacatcatgaacttcttcaagaccgagatcaccctggccaacggcgagatccgcaagcgccccctgatcgagacaaacggcgagacaggcgagatcgtgtgggacaagggccgcgacttcgccaccgtgcgcaaggtgctgagcatgccccaggtgaacatcgtgaagaagaccgaggtgcagaccggcggcttcagcaaggagagcatcctgcccaagcgcaacagcgacaagctgatcgcccgcaagaaggactgggaccccaagaagtacggcggcttcgacagccccaccgtggcctacagcgtgctggtggtggccaaggtggagaagggcaagagcaagaagctcaagagcgtgaaggagctgctgggcatcaccatcatggagcgcagcagcttcgagaagaaccccatcgacttcctggaggccaagggctacaaggaggtgaagaaggacctgatcatcaagctgcccaagtacagcctgttcgagctggagaacggccgcaagcgcatgctggccagcgccggcgagctgcagaagggcaacgagctggccctgcccagcaagtacgtgaacttcctgtacctggccagccactacgagaagctgaagggcagccccgaggacaacgagcagaagcagctgttcgtggagcagcacaagcactacctggacgagatcatcgagcagatcagcgagttcagcaagcgcgtgatcctggccgacgccaacctggacaaggtgctgagcgcctacaacaagcaccgcgacaagcccatccgcgagcaggccgagaacatcatccacctgttcaccctgaccaacctgggcgcccccgccgccttcaagtacttcgacaccaccatcgaccgcaagcgctacaccagcaccaaggaggtgctggacgccaccctgatccaccagagcatcaccggcctgtacgagacacgcatcgacctgagccagctgggcggcgacgagggcgccgacaagcgcaccgccgacggcagcgagttcgagagccccaagaagaagcgcaaggtgtaaagtgtccagaccattgtcttccaaccccagctggcctctagaacacccactggccagtcctagagctcctgtccctacccactctttgctacaataaatgctgaatgaatccatctaga

SEQ ID NO: 10 - RNA, 4173 nt, synthetic construct
  source 1..4173: mol_type = other RNA
  modified_base 2: mod_base = OTHER; note = N1-methyl pseudouridine
  modified_base 13: mod_base = OTHER; note = N1-methyl pseudouridine
  modified_base 20: mod_base = OTHER; note = N1-methyl pseudouridine
  modified_base 26: mod_base = OTHER; note = N1-methyl pseudouridine
  modified_base 32: mod_base = OTHER; note = N1-methyl pseudouridine
  modified_base 47: mod_base = OTHER; note = N1-methyl pseudouridine
  modified_base 52: mod_base = OTHER; note = N1-methyl pseudouridine
  modified_base 59: mod_base = OTHER; note = N1-methyl pseudouridine
  modified_base 62: mod_base = OTHER; note = N1-methyl pseudouridine
  modified_base 73: mod_base = OTHER; note = N1-methyl pseudouridine
  modified_base 80: mod_base = OTHER; note = N1-methyl pseudouridine
  modified_base 94: mod_base = OTHER; note = N1-methyl pseudouridine
  modified_base 95: mod_base = OTHER; note = N1-methyl pseudouridine
  modified_base 101: mod_base = OTHER; note = N1-methyl pseudouridine
  modified_base 104: mod_base = OTHER; note = N1-methyl pseudouridine
  modified_base 128: mod_base = OTHER; note = N1-methyl pseudouridine
  modified_base 140: mod_base = OTHER; note = N1-methyl pseudouridine
  modified_base 143: mod_base = OTHER; note = N1-methyl pseudouridine
  modified_base 152: mod_base = OTHER; note = N1-methyl pseudouridine
  modified_base 155: mod_base = OTHER; note = N1-methyl pseudouridine
  modified_base 157: mod_base = OTHER; note = N1-methyl pseudouridine
  modified_base 158: mod_base = OTHER; note = N1-methyl pseudouridine
  modified_base 191: mod_base = OTHER; note = N1-methyl pseudouridine
  modified_base 214: mod_base = OTHER; note = N1-methyl pseudouridine
  modified_base 236: mod_base = OTHER; note = N1-methyl pseudouridine
  modified_base 238: mod_base = OTHER; note = N1-methyl pseudouridine
  modified_base 241: mod_base = OTHER; note = N1-methyl pseudouridine
  modified_base 245: mod_base = OTHER; note = N1-methyl pseudouridine
  modified_base 254: mod_base = OTHER; note = N1-methyl pseudouridine
  modified_base 256: mod_base = OTHER; note = N1-methyl pseudouridine
  modified_base 257: mod_base = OTHER; note = N1-methyl pseudouridine
  modified_base 269: mod_base = OTHER; note = N1-methyl pseudouridine
  modified_base 278: mod_base = OTHER; note = N1-methyl pseudouridine
  modified_base 289: mod_base = OTHER; note = N1-methyl pseudouridine
  modified_base 290: mod_base = OTHER; note = N1-methyl pseudouridine
  modified_base 292: mod_base = OTHER; note = N1-methyl pseudouridine
  modified_base 293: mod_base = OTHER; note = N1-methyl pseudouridine
  modified_base 302: mod_base = OTHER; note = N1-methyl pseudouridine
  modified_base 313: mod_base = OTHER; note = N1-methyl pseudouridine
  modified_base 314: mod_base = OTHER; note = N1-methyl pseudouridine
  modified_base 317: mod_base = OTHER; note = N1-methyl pseudouridine
  modified_base 320: mod_base = OTHER; note = N1-methyl pseudouridine
  modified_base 353: mod_base = OTHER; note = N1-methyl pseudouridine
  modified_base 355: mod_base = OTHER; note = N1-methyl pseudouridine
  modified_base 356: mod_base = OTHER; note = N1-methyl pseudouridine
  modified_base 365: mod_base = OTHER; note = N1-methyl pseudouridine
  modified_base 368: mod_base = OTHER; note = N1-methyl pseudouridine
  modified_base 377: mod_base = OTHER; note = N1-methyl pseudouridine
  modified_base 382: mod_base = OTHER; note = N1-methyl pseudouridine
  modified_base 394: mod_base = OTHER; note = N1-methyl pseudouridine
  modified_base 404: mod_base = OTHER; note = N1-methyl pseudouridine
  modified_base 406: mod_base = OTHER; note = N1-methyl pseudouridine
  modified_base 413: mod_base = OTHER; note = N1-methyl pseudouridine
  modified_base 425: mod_base = OTHER; note = N1-methyl pseudouridine
  modified_base 428: mod_base = OTHER; note = N1-methyl pseudouridine
  modified_base 452: mod_base = OTHER; note = N1-methyl pseudouridine
  modified_base 458: mod_base = OTHER; note = N1-methyl pseudouridine
  modified_base 461: mod_base = OTHER; note = N1-methyl pseudouridine
  modified_base 463: mod_base = OTHER; note = N1-methyl pseudouridine
  modified_base 467: mod_base = OTHER; note = N1-methyl pseudouridine
  modified_base 473: mod_base = OTHER; note = N1-methyl pseudouridine
  modified_base 482: mod_base = OTHER; note = N1-methyl pseudouridine
  modified_base 485: mod_base = OTHER; note = N1-methyl pseudouridine
  modified_base 490: mod_base = OTHER; note = N1-methyl pseudouridine
  modified_base 491: mod_base = OTHER; note = N1-methyl pseudouridine
  modified_base 502: mod_base = OTHER; note = N1-methyl pseudouridine
  modified_base 503: mod_base = OTHER; note = N1-methyl pseudouridine
  modified_base 506: mod_base = OTHER; note = N1-methyl pseudouridine
  modified_base 509: mod_base = OTHER; note = N1-methyl pseudouridine
  modified_base 521: mod_base = OTHER; note = N1-methyl pseudouridine
  modified_base 542: mod_base = OTHER; note = N1-methyl pseudouridine
  modified_base 551: mod_base = OTHER; note = N1-methyl pseudouridine
  modified_base 553: mod_base = OTHER; note = N1-methyl pseudouridine
  modified_base 554: mod_base = OTHER; note = N1-methyl pseudouridine
  modified_base 557: mod_base = OTHER; note = N1-methyl pseudouridine
  modified_base 563: mod_base = OTHER; note = N1-methyl pseudouridine
  modified_base 566: mod_base = OTHER; note = N1-methyl pseudouridine
  modified_base 574: mod_base = OTHER; note = N1-methyl pseudouridine
  modified_base 584: mod_base = OTHER; note = N1-methyl pseudouridine
  modified_base 586: mod_base = OTHER; note = N1-methyl pseudouridine
  modified_base 587: mod_base = OTHER; note = N1-methyl pseudouridine
  modified_base 602: mod_base = OTHER; note = N1-methyl pseudouridine
  modified_base 617: mod_base = OTHER; note = N1-methyl pseudouridine
  modified_base 632: mod_base = OTHER; note = N1-methyl pseudouridine
  modified_base 635: mod_base = OTHER; note = N1-methyl pseudouridine
  modified_base 647: mod_base = OTHER; note = N1-methyl pseudouridine
  modified_base 665: mod_base = OTHER; note = N1-methyl pseudouridine
  modified_base 674: mod_base = OTHER; note = N1-methyl pseudouridine
  modified_base 677: mod_base = OTHER; note = N1-methyl pseudouridine
  modified_base 686: mod_base = OTHER; note = N1-methyl pseudouridine
  modified_base 710: mod_base = OTHER; note = N1-methyl pseudouridine
  modified_base 712: mod_base = OTHER; note = N1-methyl pseudouridine
  modified_base 713: mod_base = OTHER; note = N1-methyl pseudouridine
  modified_base 722: mod_base = OTHER; note = N1-methyl pseudouridine
  modified_base 725: mod_base = OTHER; note = N1-methyl pseudouridine
  modified_base 731: mod_base = OTHER; note = N1-methyl pseudouridine
  modified_base 737: mod_base = OTHER; note = N1-methyl pseudouridine
  modified_base 743: mod_base = OTHER; note = N1-methyl pseudouridine
  modified_base 754: mod_base = OTHER; note = N1-methyl pseudouridine
  modified_base 755: mod_base = OTHER; note = N1-methyl pseudouridine
  modified_base 766: mod_base = OTHER; note = N1-methyl pseudouridine
  modified_base 767: mod_base = OTHER; note = N1-methyl pseudouridine
  modified_base 773: mod_base = OTHER; note = N1-methyl pseudouridine
  modified_base 791: mod_base = OTHER; note = N1-methyl pseudouridine
  modified_base 797: mod_base = OTHER; note = N1-methyl pseudouridine
  modified_base 811: mod_base = OTHER; note = N1-methyl pseudouridine
  modified_base 824: mod_base = OTHER; note = N1-methyl pseudouridine
  modified_base 833: mod_base = OTHER; note = N1-methyl pseudouridine
  modified_base 836: mod_base = OTHER; note = N1-methyl pseudouridine
  modified_base 845: mod_base = OTHER; note = N1-methyl pseudouridine
  modified_base 856: mod_base = OTHER; note = N1-methyl pseudouridine
  modified_base 866: mod_base = OTHER; note = N1-methyl pseudouridine
  modified_base 868: mod_base = OTHER; note = N1-methyl pseudouridine
  modified_base 869: mod_base = OTHER; note = N1-methyl pseudouridine
  modified_base 872: mod_base = OTHER; note = N1-methyl pseudouridine
  modified_base 887: mod_base = OTHER; note = N1-methyl pseudouridine
  modified_base 899: mod_base = OTHER; note = N1-methyl pseudouridine
  modified_base 902: mod_base = OTHER; note = N1-methyl pseudouridine
  modified_base 905: mod_base = OTHER; note = N1-methyl pseudouridine
  modified_base 914: mod_base = OTHER; note = N1-methyl pseudouridine
  modified_base 917: mod_base = OTHER; note = N1-methyl pseudouridine
  modified_base 923: mod_base = OTHER; note = N1-methyl pseudouridine
  modified_base 935: mod_base = OTHER; note = N1-methyl pseudouridine
  modified_base 950: mod_base = OTHER; note = N1-methyl pseudouridine
  modified_base 962: mod_base = OTHER; note = N1-methyl pseudouridine
  modified_base 965: mod_base = OTHER; note = N1-methyl pseudouridine
  modified_base 973: mod_base = OTHER; note = N1-methyl pseudouridine
  modified_base 995: mod_base = OTHER; note = N1-methyl pseudouridine
  modified_base 1001: mod_base = OTHER; note = N1-methyl pseudouridine
  modified_base 1004: mod_base = OTHER; note = N1-methyl pseudouridine
  modified_base 1013: mod_base = OTHER; note = N1-methyl pseudouridine
  modified_base 1016: mod_base = OTHER; note = N1-methyl pseudouridine
  modified_base 1028: mod_base = OTHER; note = N1-methyl pseudouridine
  modified_base 1039: mod_base = OTHER; note = N1-methyl pseudouridine
  modified_base 1049: mod_base = OTHER; note = N1-methyl pseudouridine
  modified_base 1051: mod_base = OTHER; note = N1-methyl pseudouridine
  modified_base 1052: mod_base = OTHER; note = N1-methyl pseudouridine
  modified_base 1054: mod_base = OTHER; note = N1-methyl pseudouridine
  modified_base 1055: mod_base = OTHER; note = N1-methyl pseudouridine
  modified_base 1075: mod_base = OTHER; note = N1-methyl pseudouridine
  modified_base 1084: mod_base = OTHER; note = N1-methyl pseudouridine
  modified_base 1088: mod_base = OTHER; note = N1-methyl pseudouridine
  modified_base 1114: mod_base = OTHER; note = N1-methyl pseudouridine
  modified_base 1115: mod_base = OTHER; note = N1-methyl pseudouridine
  modified_base 1117: mod_base = OTHER; note = N1-methyl pseudouridine
  modified_base 1123: mod_base = OTHER; note = N1-methyl pseudouridine
  modified_base 1124: mod_base = OTHER; note = N1-methyl pseudouridine
  modified_base 1127: mod_base = OTHER; note = N1-methyl pseudouridine
  modified_base 1136: mod_base = OTHER; note = N1-methyl pseudouridine
  modified_base 1139: mod_base = OTHER; note = N1-methyl pseudouridine
  modified_base 1148: mod_base = OTHER; note = N1-methyl pseudouridine
  modified_base 1166: mod_base = OTHER; note = N1-methyl pseudouridine
  modified_base 1169: mod_base = OTHER; note = N1-methyl pseudouridine
  modified_base 1172: mod_base = OTHER; note = N1-methyl pseudouridine
  modified_base 1178: mod_base = OTHER; note = N1-methyl pseudouridine
  modified_base 1193: mod_base = OTHER; note = N1-methyl pseudouridine
  modified_base 1196: mod_base = OTHER; note = N1-methyl pseudouridine
  modified_base 1213: mod_base = OTHER; note = N1-methyl pseudouridine
  modified_base 1214: mod_base = OTHER; note = N1-methyl pseudouridine
  modified_base 1229: mod_base = OTHER; note = N1-methyl pseudouridine
  modified_base 1241: mod_base = OTHER; note = N1-methyl pseudouridine
  modified_base 1247: mod_base = OTHER; note = N1-methyl pseudouridine
  modified_base 1256: mod_base = OTHER; note = N1-methyl pseudouridine
  modified_base 1265: mod_base = OTHER; note = N1-methyl pseudouridine
  modified_base 1268: mod_base = OTHER; note = N1-methyl pseudouridine
  modified_base 1285: mod_base = OTHER; note = N1-methyl pseudouridine
  modified_base 1286: mod_base = OTHER; note = N1-methyl pseudouridine
  modified_base 1288: mod_base = OTHER; note = N1-methyl pseudouridine
  modified_base 1294: mod_base = OTHER; note = N1-methyl pseudouridine
  modified_base 1295: mod_base = OTHER; note = N1-methyl pseudouridine
  modified_base 1298: mod_base = OTHER; note = N1-methyl pseudouridine
  modified_base 1319: mod_base = OTHER; note = N1-methyl pseudouridine
  modified_base 1328: mod_base = OTHER; note = N1-methyl pseudouridine
  modified_base 1331: mod_base = OTHER; note = N1-methyl pseudouridine
  modified_base 1336: mod_base = OTHER; note = N1-methyl pseudouridine
  modified_base 1337: mod_base = OTHER; note = N1-methyl pseudouridine
  modified_base 1343: mod_base = OTHER; note = N1-methyl pseudouridine
  modified_base 1348: mod_base = OTHER; note = N1-methyl pseudouridine
  modified_base 1351: mod_base = OTHER; note = N1-methyl pseudouridine
  modified_base 1355: mod_base = OTHER; note = N1-methyl pseudouridine
  modified_base 1364: mod_base = OTHER; note = N1-methyl pseudouridine
  modified_base 1384: mod_base = OTHER; note = N1-methyl pseudouridine
  modified_base 1385: mod_base = OTHER; note = N1-methyl pseudouridine
  modified_base 1390: mod_base = OTHER; note = N1-methyl pseudouridine
  modified_base 1394: mod_base = OTHER; note = N1-methyl pseudouridine
  modified_base 1418: mod_base = OTHER; note = N1-methyl pseudouridine
  modified_base 1426: mod_base = OTHER; note = N1-methyl pseudouridine
  modified_base 1432: mod_base = OTHER; note = N1-methyl pseudouridine
  modified_base 1433: mod_base = OTHER; note = N1-methyl pseudouridine
  modified_base 1442: mod_base = OTHER; note = N1-methyl pseudouridine
  modified_base 1445: mod_base = OTHER; note = N1-methyl pseudouridine
  modified_base 1471: mod_base = OTHER; note = N1-methyl pseudouridine
  modified_base 1472: mod_base = OTHER; note = N1-methyl pseudouridine
  modified_base 1475: mod_base = OTHER; note = N1-methyl pseudouridine
  modified_base 1484: mod_base = OTHER; note = N1-methyl pseudouridine
  modified_base 1492: mod_base = OTHER; note = N1-methyl pseudouridine
  modified_base 1493: mod_base = OTHER; note = N1-methyl pseudouridine
  modified_base 1505: mod_base = OTHER; note = N1-methyl pseudouridine
  modified_base 1520: mod_base = OTHER; note = N1-methyl pseudouridine
  modified_base 1523: mod_base = OTHER; note = N1-methyl pseudouridine
  modified_base 1538: mod_base = OTHER; note = N1-methyl pseudouridine
  modified_base 1541: mod_base = OTHER; note = N1-methyl pseudouridine
  modified_base 1543: mod_base = OTHER; note = N1-methyl pseudouridine
  modified_base 1549: mod_base = OTHER; note = N1-methyl pseudouridine
  modified_base 1552: mod_base = OTHER; note = N1-methyl pseudouridine
  modified_base 1553: mod_base = OTHER; note = N1-methyl pseudouridine
  modified_base 1559: mod_base = OTHER; note = N1-methyl pseudouridine
  modified_base 1561: mod_base = OTHER; note = N1-methyl pseudouridine
  modified_base 1571: mod_base = OTHER; note = N1-methyl pseudouridine
  modified_base 1580: mod_base = OTHER; note = N1-methyl pseudouridine
  modified_base 1585: mod_base = OTHER; note = N1-methyl pseudouridine
  modified_base 1589: mod_base = OTHER; note = N1-methyl pseudouridine
  modified_base 1601: mod_base = OTHER; note = N1-methyl pseudouridine
  modified_base 1615: mod_base = OTHER; note = N1-methyl pseudouridine
  modified_base 1616: mod_base = OTHER; note = N1-methyl pseudouridine
  modified_base 1619: mod_base = OTHER; note = N1-methyl pseudouridine
  modified_base 1643: mod_base = OTHER; note = N1-methyl pseudouridine
  modified_base 1646: mod_base = OTHER; note = N1-methyl pseudouridine
  modified_base 1652: mod_base = OTHER; note = N1-methyl pseudouridine
  modified_base 1655: mod_base = OTHER; note = N1-methyl pseudouridine
  modified_base 1657: mod_base = OTHER; note = N1-methyl pseudouridine
  modified_base 1658: mod_base = OTHER; note = N1-methyl pseudouridine
  modified_base 1676: mod_base = OTHER; note = N1-methyl pseudouridine
  modified_base 1682: mod_base = OTHER; note = N1-methyl pseudouridine
  modified_base 1691: mod_base = OTHER; note = N1-methyl pseudouridine
  modified_base 1702: mod_base = OTHER; note = N1-methyl pseudouridine
  modified_base 1705: mod_base = OTHER; note = N1-methyl pseudouridine
  modified_base 1706: mod_base = OTHER; note = N1-methyl pseudouridine
  modified_base 1715: mod_base = OTHER; note = N1-methyl pseudouridine
  modified_base 1720: mod_base = OTHER; note = N1-methyl pseudouridine
  modified_base 1723: mod_base = OTHER; note = N1-methyl pseudouridine
  modified_base 1724: mod_base = OTHER; note = N1-methyl pseudouridine
  modified_base 1733: mod_base = OTHER; note = N1-methyl pseudouridine
  modified_base 1739: mod_base = OTHER; note = N1-methyl pseudouridine
  modified_base 1748: mod_base = OTHER; note = N1-methyl pseudouridine
  modified_base 1759: mod_base = OTHER; note = N1-methyl pseudouridine
  modified_base 1760: mod_base = OTHER; note = N1-methyl pseudouridine
  modified_base 1772: mod_base = OTHER; note = N1-methyl pseudouridine
  modified_base 1780: mod_base = OTHER; note = N1-methyl pseudouridine
  modified_base 1790: mod_base = OTHER; note = N1-methyl pseudouridine
  modified_base 1793: mod_base = OTHER; note = N1-methyl pseudouridine
  modified_base 1799: mod_base = OTHER; note = N1-methyl pseudouridine
  modified_base 1802: mod_base = OTHER; note = N1-methyl pseudouridine
  modified_base 1816: mod_base = OTHER; note = N1-methyl pseudouridine
  modified_base 1817: mod_base = OTHER; note = N1-methyl pseudouridine
  modified_base 1820: mod_base = OTHER; note = N1-methyl pseudouridine
  modified_base 1844: mod_base = OTHER; note = N1-methyl pseudouridine
  modified_base 1847: mod_base = OTHER; note = N1-methyl pseudouridine
  modified_base 1856: mod_base = OTHER; note = N1-methyl pseudouridine
  modified_base 1859: mod_base = OTHER; note = N1-methyl pseudouridine
  modified_base 1862: mod_base = OTHER; note = N1-methyl pseudouridine
  modified_base 1868: mod_base = OTHER; note = N1-methyl pseudouridine
  modified_base 1874: mod_base = OTHER; note = N1-methyl pseudouridine
  modified_base 1876: mod_base = OTHER; note = N1-methyl pseudouridine
  modified_base 1877: mod_base = OTHER; note = N1-methyl pseudouridine
  modified_base 1892: mod_base = OTHER; note = N1-methyl pseudouridine
  modified_base 1895: mod_base = OTHER; note = N1-methyl pseudouridine
  modified_base 1907: mod_base = OTHER; note = N1-methyl pseudouridine
  modified_base 1915: mod_base = OTHER; note = N1-methyl pseudouridine
  modified_base 1925: mod_base = OTHER; note = N1-methyl pseudouridine
  modified_base 1927: mod_base = OTHER; note = N1-methyl pseudouridine
  modified_base 1928: mod_base = OTHER; note = N1-methyl pseudouridine
  modified_base 1940: mod_base = OTHER; note = N1-methyl pseudouridine
  modified_base 1943: mod_base = OTHER; note = N1-methyl pseudouridine
  modified_base 1952: mod_base = OTHER; note = N1-methyl pseudouridine
  modified_base 1966: mod_base = OTHER; note = N1-methyl pseudouridine
  modified_base 1975: mod_base = OTHER; note = N1-methyl pseudouridine
  modified_base 1985: mod_base = OTHER; note = N1-methyl pseudouridine
  modified_base 1997: mod_base = OTHER; note = N1-methyl pseudouridine
  modified_base 2000: mod_base = OTHER; note = N1-methyl pseudouridine
  modified_base 2009: mod_base = OTHER; note = N1-methyl pseudouridine
  modified_base 2036: mod_base = OTHER; note = N1-methyl pseudouridine
  modified_base 2039: mod_base = OTHER; note = N1-methyl pseudouridine
  modified_base 2044: mod_base = OTHER; note = N1-methyl pseudouridine
  modified_base 2045: mod_base = OTHER; note = N1-methyl pseudouridine
  modified_base 2048: mod_base = OTHER; note = N1-methyl pseudouridine
  modified_base 2062: mod_base = OTHER; note = N1-methyl pseudouridine
  modified_base 2063: mod_base = OTHER; note = N1-methyl pseudouridine
  modified_base 2077: mod_base = OTHER; note = N1-methyl pseudouridine
  modified_base 2078: mod_base = OTHER; note = N1-methyl pseudouridine
  modified_base 2081: mod_base = OTHER; note = N1-methyl pseudouridine
  modified_base 2087: mod_base = OTHER; note = N1-methyl pseudouridine
  modified_base 2090: mod_base = OTHER; note = N1-methyl pseudouridine
  modified_base 2105: mod_base = OTHER; note = N1-methyl pseudouridine
  modified_base 2110: mod_base = OTHER; note = N1-methyl pseudouridine
  modified_base 2111: mod_base = OTHER; note = N1-methyl pseudouridine
  modified_base 2123: mod_base = OTHER; note = N1-methyl pseudouridine
  modified_base 2138: mod_base = OTHER; note = N1-methyl pseudouridine
  modified_base 2159: mod_base = OTHER; note = N1-methyl pseudouridine
  modified_base 2171: mod_base = OTHER; note = N1-methyl pseudouridine
  modified_base 2180: mod_base = OTHER; note = N1-methyl pseudouridine
  modified_base 2198: mod_base = OTHER; note = N1-methyl pseudouridine
  modified_base 2210: mod_base = OTHER; note = N1-methyl pseudouridine
  modified_base 2213: mod_base = OTHER; note = N1-methyl pseudouridine
  modified_base 2222: mod_base = OTHER; note = N1-methyl pseudouridine
  modified_base 2228: mod_base = OTHER; note = N1-methyl pseudouridine
  modified_base 2231: mod_base = OTHER; note = N1-methyl pseudouridine
  modified_base 2240: mod_base = OTHER; note = N1-methyl pseudouridine
  modified_base 2243: mod_base = OTHER; note = N1-methyl pseudouridine
  modified_base 2249: mod_base = OTHER; note = N1-methyl pseudouridine
  modified_base 2252: mod_base = OTHER; note = N1-methyl pseudouridine
  modified_base 2276: mod_base = OTHER; note = N1-methyl pseudouridine
  modified_base 2279: mod_base = OTHER; note = N1-methyl pseudouridine
  modified_base 2282: mod_base = OTHER; note = N1-methyl pseudouridine
  modified_base 2288: mod_base = OTHER; note = N1-methyl pseudouridine
  modified_base 2342: mod_base = OTHER; note = N1-methyl pseudouridine
  modified_base 2351: mod_base = OTHER; note = N1-methyl pseudouridine
  modified_base 2363: mod_base = OTHER; note = N1-methyl pseudouridine
  modified_base 2372: mod_base = OTHER; note = N1-methyl pseudouridine
  modified_base 2384: mod_base = OTHER; note = N1-methyl pseudouridine
  modified_base 2387: mod_base = OTHER; note = N1-methyl pseudouridine
  modified_base 2402: mod_base = OTHER; note = N1-methyl pseudouridine
  modified_base 2417: mod_base = OTHER; note = N1-methyl pseudouridine
  modified_base 2432: mod_base = OTHER; note = N1-methyl pseudouridine
  modified_base 2434: mod_base = OTHER; note = N1-methyl pseudouridine
  modified_base 2438: mod_base = OTHER; note = N1-methyl pseudouridine
  modified_base 2440: mod_base = OTHER; note = N1-methyl pseudouridine
  modified_base 2443: mod_base = OTHER; note = N1-methyl pseudouridine
  modified_base 2447: mod_base = OTHER; note = N1-methyl pseudouridine
  modified_base 2465: mod_base = OTHER; note = N1-methyl pseudouridine
  modified_base 2467: mod_base = OTHER; note = N1-methyl pseudouridine
  modified_base 2471: mod_base = OTHER; note = N1-methyl pseudouridine
  modified_base 2483: mod_base = OTHER; note = N1-methyl pseudouridine
  modified_base 2489: mod_base = OTHER; note = N1-methyl pseudouridine
  modified_base 2498: mod_base = OTHER; note = N1-methyl pseudouridine
  modified_base 2506: mod_base = OTHER; note = N1-methyl pseudouridine
  modified_base 2513: mod_base = OTHER; note = N1-methyl pseudouridine
  modified_base 2522: mod_base = OTHER; note = N1-methyl pseudouridine
  modified_base 2525: mod_base = OTHER; note = N1-methyl pseudouridine
  modified_base 2536: mod_base = OTHER; note = N1-methyl pseudouridine
  modified_base 2537: mod_base = OTHER; note = N1-methyl pseudouridine
  modified_base 2540: mod_base = OTHER; note = N1-methyl pseudouridine
  modified_base 2555: mod_base = OTHER; note = N1-methyl pseudouridine
  modified_base 2567: mod_base = OTHER; note = N1-methyl pseudouridine
  modified_base 2570: mod_base = OTHER; note = N1-methyl pseudouridine
  modified_base 2609: mod_base = OTHER; note = N1-methyl pseudouridine
  modified_base 2624: mod_base = OTHER; note = N1-methyl pseudouridine
  modified_base 2627: mod_base = OTHER; note = N1-methyl pseudouridine
  modified_base 2636: mod_base = OTHER; note = N1-methyl pseudouridine
  modified_base 2644: mod_base = OTHER; note = N1-methyl pseudouridine
  modified_base 2647: mod_base = OTHER; note = N1-methyl pseudouridine
  modified_base 2657: mod_base = OTHER; note = N1-methyl pseudouridine
  modified_base 2660: mod_base = OTHER; note = N1-methyl pseudouridine
  modified_base 2672: mod_base = OTHER; note = N1-methyl pseudouridine
  modified_base 2675: mod_base = OTHER; note = N1-methyl pseudouridine
  modified_base 2689: mod_base = OTHER; note = N1-methyl pseudouridine
  modified_base 2690: mod_base = OTHER; note = N1-methyl pseudouridine
  modified_base 2699: mod_base = OTHER; note = N1-methyl pseudouridine
  modified_base 2723: mod_base = OTHER; note = N1-methyl pseudouridine
  modified_base 2732: mod_base = OTHER; note = N1-methyl pseudouridine
  modified_base 2746: mod_base = OTHER; note = N1-methyl pseudouridine
  modified_base 2747: mod_base = OTHER; note = N1-methyl pseudouridine
  modified_base 2750: mod_base = OTHER; note = N1-methyl pseudouridine
  modified_base 2762: mod_base = OTHER; note = N1-methyl pseudouridine
  modified_base 2765: mod_base = OTHER; note = N1-methyl pseudouridine
  modified_base 2780: mod_base = OTHER; note = N1-methyl pseudouridine
  modified_base 2792: mod_base = OTHER; note = N1-methyl pseudouridine
  modified_base 2801: mod_base = OTHER; note = N1-methyl pseudouridine
  modified_base 2804: mod_base = OTHER; note = N1-methyl pseudouridine
  modified_base 2816: mod_base = OTHER; note = N1-methyl pseudouridine
  modified_base 2827: mod_base = OTHER; note = N1-methyl pseudouridine
  modified_base 2846: mod_base = OTHER; note = N1-methyl pseudouridine
  modified_base 2849: mod_base = OTHER; note = N1-methyl pseudouridine
  modified_base 2858: mod_base = OTHER; note = N1-methyl pseudouridine
  modified_base 2864: mod_base = OTHER; note = N1-methyl pseudouridine
  modified_base 2867: mod_base = OTHER; note = N1-methyl pseudouridine
  modified_base 2873: mod_base = OTHER; note = N1-methyl pseudouridine
  modified_base 2885: mod_base = OTHER; note = N1-methyl pseudouridine
  modified_base 2888: mod_base = OTHER; note = N1-methyl pseudouridine
  modified_base 2896: mod_base = OTHER; note = N1-methyl pseudouridine
  modified_base 2897: mod_base = OTHER; note = N1-methyl pseudouridine
  modified_base 2908: mod_base = OTHER; note = N1-methyl pseudouridine
  modified_base 2909: mod_base = OTHER; note = N1-methyl pseudouridine
  modified_base 2914: mod_base = OTHER; note = N1-methyl pseudouridine
  modified_base 2915: mod_base = OTHER; note = N1-methyl pseudouridine
  modified_base 2917: mod_base = OTHER; note = N1-methyl pseudouridine
  modified_base 2924: mod_base = OTHER; note = N1-methyl pseudouridine
  modified_base 2933: mod_base = OTHER; note = N1-methyl pseudouridine
  modified_base 2941: mod_base = OTHER; note = N1-methyl pseudouridine
  modified_base 2962: mod_base = OTHER; note = N1-methyl pseudouridine
  modified_base 2966: mod_base = OTHER; note = N1-methyl pseudouridine
  modified_base 2975: mod_base = OTHER; note = N1-methyl pseudouridine
  modified_base 2978: mod_base = OTHER; note = N1-methyl pseudouridine
  modified_base 2990: mod_base = OTHER; note = N1-methyl pseudouridine
  modified_base 2993: mod_base = OTHER; note = N1-methyl pseudouridine
  modified_base 3001: mod_base = OTHER; note = N1-methyl pseudouridine
  modified_base 3011: mod_base = OTHER; note = N1-methyl pseudouridine
  modified_base 3022: mod_base = OTHER; note = N1-methyl pseudouridine
  modified_base 3023: mod_base = OTHER; note = N1-methyl pseudouridine
  modified_base 3026: mod_base = OTHER; note = N1-methyl pseudouridine
  modified_base 3028: mod_base = OTHER; note = N1-methyl pseudouridine
  modified_base 3037: mod_base = OTHER; note = N1-methyl pseudouridine
  modified_base 3044: mod_base = OTHER; note = N1-methyl pseudouridine
  modified_base 3046: mod_base = OTHER; note = N1-methyl pseudouridine
  modified_base 3053: mod_base = OTHER; note = N1-methyl pseudouridine
  modified_base 3062: mod_base = OTHER; note = N1-methyl pseudouridine
  modified_base 3065: mod_base = OTHER; note = N1-methyl pseudouridine
  modified_base 3086: mod_base = OTHER; note = N1-methyl pseudouridine
  modified_base 3106: mod_base = OTHER; note = N1-methyl pseudouridine
  modified_base 3109: mod_base = OTHER; note = N1-methyl pseudouridine
  modified_base 3110: mod_base = OTHER; note = N1-methyl pseudouridine
  modified_base 3112: mod_base = OTHER; note = N1-methyl pseudouridine
  modified_base 3113: mod_base = OTHER; note = N1-methyl pseudouridine
  modified_base 3115: mod_base = OTHER; note = N1-methyl pseudouridine
  modified_base 3125: mod_base = OTHER; note = N1-methyl pseudouridine
  modified_base 3128: mod_base = OTHER; note = N1-methyl pseudouridine
  modified_base 3133: mod_base = OTHER; note = N1-methyl pseudouridine
  modified_base 3134: mod_base = OTHER; note = N1-methyl pseudouridine
  modified_base 3136: mod_base = OTHER; note = N1-methyl pseudouridine
  modified_base 3137: mod_base = OTHER; note = N1-methyl pseudouridine
  modified_base 3149: mod_base = OTHER; note = N1-methyl pseudouridine
  modified_base 3155: mod_base = OTHER; note = N1-methyl pseudouridine
  modified_base 3170: mod_base = OTHER; note = N1-methyl pseudouridine
  modified_base 3185: mod_base = OTHER; note = N1-methyl pseudouridine
  modified_base 3188: mod_base = OTHER; note = N1-methyl pseudouridine
  modified_base 3215: mod_base = OTHER; note = N1-methyl pseudouridine
  modified_base 3218: mod_base = OTHER; note = N1-methyl pseudouridine
  modified_base 3220: mod_base = OTHER; note = N1-methyl pseudouridine
  modified_base 3238: mod_base = OTHER; note = N1-methyl pseudouridine
  modified_base 3239: mod_base = OTHER; note = N1-methyl pseudouridine
  modified_base 3248: mod_base = OTHER; note = N1-methyl pseudouridine
  modified_base 3257: mod_base = OTHER; note = N1-methyl pseudouridine
  modified_base 3260: mod_base = OTHER; note = N1-methyl pseudouridine
  modified_base 3266: mod_base = OTHER; note = N1-methyl pseudouridine
  modified_base 3275: mod_base = OTHER; note = N1-methyl pseudouridine
  modified_base 3281: mod_base = OTHER; note = N1-methyl pseudouridine
  modified_base 3284: mod_base = OTHER; note = N1-methyl pseudouridine
  modified_base 3299: mod_base = OTHER; note = N1-methyl pseudouridine
  modified_base 3313: mod_base = OTHER; note = N1-methyl pseudouridine
  modified_base 3314: mod_base = OTHER; note = N1-methyl pseudouridine
  modified_base 3329: mod_base = OTHER; note = N1-methyl pseudouridine
  modified_base 3332: mod_base = OTHER; note = N1-methyl pseudouridine
  modified_base 3356: mod_base = OTHER; note = N1-methyl pseudouridine
  modified_base 3359: mod_base = OTHER; note = N1-methyl pseudouridine
  modified_base 3376: mod_base = OTHER; note = N1-methyl pseudouridine
  modified_base 3391: mod_base = OTHER; note = N1-methyl pseudouridine
  modified_base 3400: mod_base = OTHER; note = N1-methyl pseudouridine
  modified_base 3401: mod_base = OTHER; note = N1-methyl pseudouridine
  modified_base 3416: mod_base = OTHER; note = N1-methyl pseudouridine
  modified_base 3421: mod_base = OTHER; note = N1-methyl pseudouridine
  modified_base 3428: mod_base = OTHER; note = N1-methyl pseudouridine
  modified_base 3431: mod_base = OTHER; note = N1-methyl pseudouridine
  modified_base 3434: mod_base = OTHER; note = N1-methyl pseudouridine
  modified_base 3437: mod_base = OTHER; note = N1-methyl pseudouridine
  modified_base 3446: mod_base = OTHER; note = N1-methyl pseudouridine
  modified_base 3470: mod_base = OTHER; note = N1-methyl pseudouridine
  modified_base 3479: mod_base = OTHER; note = N1-methyl pseudouridine
  modified_base 3488: mod_base = OTHER; note = N1-methyl pseudouridine
  modified_base 3491: mod_base = OTHER; note = N1-methyl pseudouridine
  modified_base 3497: mod_base = OTHER; note = N1-methyl pseudouridine
  modified_base 3503: mod_base = OTHER; note = N1-methyl pseudouridine
  modified_base 3506: mod_base = OTHER; note = N1-methyl pseudouridine
  modified_base 3520: mod_base = OTHER; note = N1-methyl pseudouridine
  modified_base 3521: mod_base = OTHER; note = N1-methyl pseudouridine
  modified_base 3536: mod_base = OTHER; note = N1-methyl pseudouridine
  modified_base 3541: mod_base = OTHER; note = N1-methyl pseudouridine
  modified_base 3542: mod_base = OTHER; note = N1-methyl pseudouridine
  modified_base 3545: mod_base = OTHER; note = N1-methyl pseudouridine
  modified_base 3559: mod_base = OTHER; note = N1-methyl pseudouridine
  modified_base 3569: mod_base = OTHER; note = N1-methyl pseudouridine
  modified_base 3581: mod_base = OTHER; note = N1-methyl pseudouridine
  modified_base 3584: mod_base = OTHER; note = N1-methyl pseudouridine
  modified_base 3587: mod_base = OTHER; note = N1-methyl pseudouridine
  modified_base 3593: mod_base = OTHER; note = N1-methyl pseudouridine
  modified_base 3601: mod_base = OTHER; note = N1-methyl pseudouridine
  modified_base 3608: mod_base = OTHER; note = N1-methyl pseudouridine
  modified_base 3610: mod_base = OTHER; note = N1-methyl pseudouridine
  modified_base 3611: mod_base = OTHER; note = N1-methyl pseudouridine
  modified_base 3617: mod_base = OTHER; note = N1-methyl pseudouridine
  modified_base 3638: mod_base = OTHER; note = N1-methyl pseudouridine
  modified_base 3641: mod_base = OTHER; note = N1-methyl pseudouridine
  modified_base 3659: mod_base = OTHER; note = N1-methyl pseudouridine
  modified_base 3677: mod_base = OTHER; note = N1-methyl pseudouridine
  modified_base 3683: mod_base = OTHER; note = N1-methyl pseudouridine
  modified_base 3694: mod_base = OTHER; note = N1-methyl pseudouridine
  modified_base 3698: mod_base = OTHER; note = N1-methyl pseudouridine
  modified_base 3703: mod_base = OTHER; note = N1-methyl pseudouridine
  modified_base 3704: mod_base = OTHER; note = N1-methyl pseudouridine
  modified_base 3707: mod_base = OTHER; note = N1-methyl pseudouridine
  modified_base 3709: mod_base = OTHER; note = N1-methyl pseudouridine
  modified_base 3713: mod_base = OTHER; note = N1-methyl pseudouridine
  modified_base 3724: mod_base = OTHER; note = N1-methyl pseudouridine
  modified_base 3734: mod_base = OTHER; note = N1-methyl pseudouridine
  modified_base 3770: mod_base = OTHER; note = N1-methyl pseudouridine
  modified_base 3772: mod_base = OTHER; note = N1-methyl pseudouridine
  modified_base 3773: mod_base = OTHER; note = N1-methyl pseudouridine
  modified_base 3776: mod_base = OTHER; note = N1-methyl pseudouridine
  modified_base 3793: mod_base = OTHER; note = N1-methyl pseudouridine
  modified_base 3797: mod_base = OTHER; note = N1-methyl pseudouridine
  modified_base 3806: mod_base = OTHER; note = N1-methyl pseudouridine
  modified_base 3809: mod_base = OTHER; note = N1-methyl pseudouridine
  modified_base 3818: mod_base = OTHER; note = N1-methyl pseudouridine
  modified_base 3826: mod_base = OTHER; note = N1-methyl pseudouridine
  modified_base 3827: mod_base = OTHER; note = N1-methyl pseudouridine
  modified_base 3839: mod_base = OTHER; note = N1-methyl pseudouridine
  modified_base 3842: mod_base = OTHER; note = N1-methyl pseudouridine
  modified_base 3845: mod_base = OTHER; note = N1-methyl pseudouridine
  modified_base 3860: mod_base = OTHER; note = N1-methyl pseudouridine
  modified_base 3869: mod_base = OTHER; note = N1-methyl pseudouridine
  modified_base 3872: mod_base = OTHER; note = N1-methyl pseudouridine
  modified_base 3880: mod_base = OTHER; note = N1-methyl pseudouridine
  modified_base 3905: mod_base = OTHER; note = N1-methyl pseudouridine
  modified_base 3926: mod_base = OTHER; note = N1-methyl pseudouridine
  modified_base 3929: mod_base = OTHER; note = N1-methyl pseudouridine
  modified_base 3935: mod_base = OTHER; note = N1-methyl pseudouridine
  modified_base 3937: mod_base = OTHER; note = N1-methyl pseudouridine
  modified_base 3938: mod_base = OTHER; note = N1-methyl pseudouridine
  modified_base 3944: mod_base = OTHER; note = N1-methyl pseudouridine
  modified_base 3953: mod_base = OTHER; note = N1-methyl pseudouridine
  modified_base 3970: mod_base = OTHER; note = N1-methyl pseudouridine
  modified_base 3971: mod_base = OTHER; note = N1-methyl pseudouridine
  modified_base 3976: mod_base = OTHER; note = N1-methyl pseudouridine
  modified_base 3979: mod_base = OTHER; note = N1-methyl pseudouridine
  modified_base 3980: mod_base = OTHER; note = N1-methyl pseudouridine
  modified_base 3992: mod_base = OTHER; note = N1-methyl pseudouridine
  modified_base 4006: mod_base = OTHER; note = N1-methyl pseudouridine
  modified_base 4025: mod_base = OTHER; note = N1-methyl pseudouridine
  modified_base 4028: mod_base = OTHER; note = N1-methyl pseudouridine
  modified_base 4040: mod_base = OTHER; note = N1-methyl pseudouridine
  modified_base 4043: mod_base = OTHER; note = N1-methyl pseudouridine
  modified_base 4055: mod_base = OTHER; note = N1-methyl pseudouridine
  modified_base 4064: mod_base = OTHER; note = N1-methyl pseudouridine
  modified_base 4066: mod_base = OTHER; note = N1-methyl pseudouridine
  modified_base 4079: mod_base = OTHER; note = N1-methyl pseudouridine
  modified_base 4085: mod_base = OTHER; note = N1-methyl pseudouridine
  modified_base 4094: mod_base = OTHER; note = N1-methyl pseudouridine
  modified_base 4141: mod_base = OTHER; note = N1-methyl pseudouridine
  modified_base 4142: mod_base = OTHER; note = N1-methyl pseudouridine
  modified_base 4169: mod_base = OTHER; note = N1-methyl pseudouridine
  modified_base 4171: mod_base = OTHER; note = N1-methyl pseudouridine
anggacaagaagnacagcancggccnggacancggcaccaacagcgngggcngggccgngancaccgacgagnacaaggngcccagcaagaagnncaaggngcngggcaacaccgaccgccacagcancaagaagaaccngancggcgcccngcngnncgacagcggcgagacagccgaggccacccgccngaagcgcaccgcccgccgccgcnacacccgccgcaagaaccgcancngcnaccngcaggagancnncagcaacgaganggccaaggnggacgacagcnncnnccaccgccnggaggagagcnnccnggnggaggaggacaagaagcacgagcgccaccccancnncggcaacancgnggacgaggnggccnaccacgagaagnaccccaccancnaccaccngcgcaagaagcnggnggacagcaccgacaaggccgaccngcgccngancnaccnggcccnggcccacangancaagnnccgcggccacnnccngancgagggcgaccngaaccccgacaacagcgacgnggacaagcngnncanccagcnggngcagaccnacaaccagcngnncgaggagaaccccancaacgccagcggcgnggacgccaaggccanccngagcgcccgccngagcaagagccgccgccnggagaaccngancgcccagcngcccggcgagaagaagaacggccngnncggcaaccngancgcccngagccngggccngacccccaacnncaagagcaacnncgaccnggccgaggacgccaagcngcagcngagcaaggacaccnacgacgacgaccnggacaaccngcnggcccagancggcgaccagnacgccgaccngnnccnggccgccaagaaccngagcgacgccanccngcngagcgacanccngcgcgngaacaccgagancaccaaggccccccngagcgccagcangancaagcgcnacgacgagcaccaccaggaccngacccngcngaaggcccnggngcgccagcagcngcccgagaagnacaaggagancnncnncgaccagagcaagaacggcnacgccggcnacancgacggcggcgccagccaggaggagnncnacaagnncancaagcccanccnggagaaganggacggcaccgaggagcngcnggngaagcngaaccgcgaggaccngcngcgcaagcagcgcaccnncgacaacggcagcancccccaccaganccaccngggcgagcngcacgccanccngcgccgccaggaggacnncnaccccnnccngaaggacaaccgcgagaagancgagaaganccngaccnnccgcanccccnacnacgngggcccccnggcccgcggcaacagccgcnncgccnggangacccgcaagagcgaggagacaancacccccnggaacnncgaggaggnggnggacaagggcgccagcgcccagagcnncancgagcgcangaccaacnncgacaagaaccngcccaacgagaaggngcngcccaagcacagccngcngnacgagnacnncaccgngnacaacgagcngaccaaggngaagnacgngaccgagggcangcgcaagcccgccnnccngagcggcgagcagaagaaggccancgnggaccngcngnncaagaccaaccgcaaggngaccgngaagcagcngaaggaggacnacnncaagaagancgagngcnncgacagcgnggagancagcggcgnggaggaccgcnncaacgccagccngggcaccnaccacgaccngcngaagancancaaggacaaggacnnccnggacaacgaggagaacgaggacanccnggaggacancgngcngacccngacccngnncgaggaccgcgagangancgaggagcgccngaagaccnacgcccaccngnncgacgacaaggngangaagcagcngaagcgccgccgcnacaccggcnggggccgccngagccgcaagcngancaacggcanccgcgacaagcagagcggcaagaccanccnggacnnccncaagagcgacggcnncgccaaccgcaacnncangcagcnganccacgacgacagccngaccnncaaggaggacanccagaaggcccaggngagcggccagggcgacagccngcacgagcacancgccaaccnggccggcagccccgccancaagaagggcanccngcagaccgngaaggnggnggacgagcnggngaaggngangggccgccacaagcccgagaacancgngancgaganggcccgcgagaaccagaccacccagaagggccagaagaacagccgcgagcgcangaagcgcancgaggagggcancaaggagcngggcagccaganccngaaggagcaccccgnggagaacacccagcngcagaacgagaagcngnaccngnacnaccngcagaacggccgcgacangnacgnggaccaggagcnggacancaaccgccngagcgacnacgacgnggacgccancgngccccagagcnnccngaaggacgacagcancgacaacaaggngcngacccgcagcgacaagaaccgcggcaagagcgacaacgngcccagcgaggaggnggngaagaagangaagaacnacnggcgccagcngcngaacgccaagcngancacccagcgcaagnncgacaaccngaccaaggccgagcgcggcggccngagcgagcnggacaaggccggcnncancaagcgccagcnggnggagacacgccagancaccaagcacgnggcccaganccnggacagccgcangaacaccaagnacgacgagaacgacaagcnganccgcgaggngaaggngancacccncaagagcaagcnggngagcgacnnccgcaaggacnnccagnncnacaaggngcgcgagancaacaacnaccaccacgcccacgacgccnaccngaacgccgnggngggcaccgcccngancaagaagnaccccaagcnggagagcgagnncgngnacggcgacnacaaggngnacgacgngcgcaagangancgccaagagcgagcaggagancggcaaggccaccgccaagnacnncnncnacagcaacancangaacnncnncaagaccgagancacccnggccaacggcgaganccgcaagcgcccccngancgagacaaacggcgagacaggcgagancgngngggacaagggccgcgacnncgccaccgngcgcaaggngcngagcangccccaggngaacancgngaagaagaccgaggngcagaccggcggcnncagcaaggagagcanccngcccaagcgcaacagcgacaagcngancgcccgcaagaaggacngggaccccaagaagnacggcggcnncgacagccccaccgnggccnacagcgngcnggnggnggccaaggnggagaagggcaagagcaagaagcncaagagcgngaaggagcngcngggcancaccancanggagcgcagcagcnncgagaagaaccccancgacnnccnggaggccaagggcnacaaggaggngaagaaggaccngancancaagcngcccaagnacagccngnncgagcnggagaacggccgcaagcgcangcnggccagcgccggcgagcngcagaagggcaacgagcnggcccngcccagcaagnacgngaacnnccngnaccnggccagccacnacgagaagcngaagggcagccccgaggacaacgagcagaagcagcngnncgnggagcagcacaagcacnaccnggacgagancancgagcagancagcgagnncagcaagcgcgnganccnggccgacgccaaccnggacaaggngcngagcgccnacaacaagcaccgcgacaagcccanccgcgagcaggccgagaacancanccaccngnncacccngaccaaccngggcgcccccgccgccnncaagnacnncgacaccaccancgaccgcaagcgcnacaccagcaccaaggaggngcnggacgccacccnganccaccagagcancaccggccngnacgagacacgcancgaccngagccagcngggcggcgacgagggcgccgacaagcgcaccgccgacggcagcgagnncgagagccccaagaagaagcgcaaggngnaa

SEQ ID NO: 11 - DNA, 23 bp, synthetic construct
  source 1..23: mol_type = other DNA
ggagccagaataacattcggagg

SEQ ID NO: 12 - DNA, 23 bp, synthetic construct
  source 1..23: mol_type = other DNA
ctagaggctttttttgaacaagg

SEQ ID NO: 13 - DNA, 23 bp, synthetic construct
  source 1..23: mol_type = other DNA
ccatcactggacattgcgtcagg

SEQ ID NO: 14 - DNA, 23 bp, synthetic construct
  source 1..23: mol_type = other DNA
aactctcctcacaactcccacgg

SEQ ID NO: 15 - DNA, 23 bp, synthetic construct
  source 1..23: mol_type = other DNA
gagccagaataacattcggaggg

SEQ ID NO: 16 - DNA, 23 bp, synthetic construct
  source 1..23: mol_type = other DNA
aataacattcggagggacgaagg

SEQ ID NO: 17 - DNA, 23 bp, synthetic construct
  source 1..23: mol_type = other DNA
tattctggctccaagcctagagg

SEQ ID NO: 18 - DNA, 23 bp, synthetic construct
  source 1..23: mol_type = other DNA
tgacaccacattggcatcggagg

SEQ ID NO: 19 - DNA, 23 bp, synthetic construct
  source 1..23: mol_type = other DNA
acatgttcttcctgtgatagtgg

SEQ ID NO: 20 - DNA, 23 bp, synthetic construct
  source 1..23: mol_type = other DNA
ctacttagaagctgaaacgtggg

SEQ ID NO: 21 - DNA, 23 bp, synthetic construct
  source 1..23: mol_type = other DNA
ccacgtttcagcttctaagtagg

SEQ ID NO: 22 - DNA, 23 bp, synthetic construct
  source 1..23: mol_type = other DNA
accccggggctttgctccgttgg

SEQ ID NO: 23 - DNA, 23 bp, synthetic construct
  source 1..23: mol_type = other DNA
caggattgctaccatggtgatgg

SEQ ID NO: 24 - DNA, 23 bp, synthetic construct
  source 1..23: mol_type = other DNA
aactcaaggttgtacccatttgg

SEQ ID NO: 25 - DNA, 23 bp, synthetic construct
  source 1..23: mol_type = other DNA
caacagaatattatccaaatggg

SEQ ID NO: 26 - DNA, 23 bp, synthetic construct
  source 1..23: mol_type = other DNA
ggtaatagttggaggcgcgacgg

SEQ ID NO: 27 - DNA, 23 bp, synthetic construct
  source 1..23: mol_type = other DNA
taccccgattccaagcctagagg

SEQ ID NO: 28 - DNA, 23 bp, synthetic construct
  source 1..23: mol_type = other DNA
gggatcctccgatgccaatgtgg

SEQ ID NO: 29 - DNA, 23 bp, synthetic construct
  source 1..23: mol_type = other DNA
ctgcatctgagcatcgtgtcagg

SEQ ID NO: 30 - DNA, 23 bp, synthetic construct
  source 1..23: mol_type = other DNA
cgtccctccgaatgttattctgg

SEQ ID NO: 31 - DNA, 23 bp, synthetic construct
  source 1..23: mol_type = other DNA
cttggaactgggaccaccgtggg

SEQ ID NO: 32 - DNA, 23 bp, synthetic construct
  source 1..23: mol_type = other DNA
acagagcttccttctgaagaagg

SEQ ID NO: 33 - DNA, 23 bp, synthetic construct
  source 1..23: mol_type = other DNA
cctacttagaagctgaaacgtgg

SEQ ID NO: 34 - DNA, 23 bp, synthetic construct
  source 1..23: mol_type = other DNA
catagatgaccaagattgacagg

SEQ ID NO: 35 - DNA, 23 bp, synthetic construct
  source 1..23: mol_type = other DNA
tgataccacactggcatcagagg

SEQ ID NO: 36 - DNA, 23 bp, synthetic construct
  source 1..23: mol_type = other DNA
tgacaccacatcaacataatagg

SEQ ID NO: 37 - DNA, 23 bp, synthetic construct
  source 1..23: mol_type = other DNA
catagatgaccaagcttggcagg

SEQ ID NO: 38 - DNA, 23 bp, synthetic construct
  source 1..23: mol_type = other DNA
ggaccaccgtgagagttgcaagg

SEQ ID NO: 39 - DNA, 23 bp, synthetic construct
  source 1..23: mol_type = other DNA
ggtcccagatccaagcacagagg

SEQ ID NO: 40 - DNA, 23 bp, synthetic construct
  source 1..23: mol_type = other DNA
ctatgacaccacattggcatcgg

SEQ ID NO: 41 - DNA, 23 bp, synthetic construct
  source 1..23: mol_type = other DNA
acatacttcattactgtcacagg

SEQ ID NO: 42 - DNA, 23 bp, synthetic construct
  source 1..23: mol_type = other DNA
gataactctgtccatttccgtgg

SEQ ID NO: 43 - DNA, 23 bp, synthetic construct
  source 1..23: mol_type = other DNA
tccacggctgtttctgaacaagg

SEQ ID NO: 44 - DNA, 23 bp, synthetic construct
  source 1..23: mol_type = other DNA
aggacacttgattctgtcactgg

SEQ ID NO: 45 - DNA, 23 bp, synthetic construct
  source 1..23: mol_type = other DNA
aggagagttgattccatcactgg

SEQ ID NO: 46 - DNA, 23 bp, synthetic construct
  source 1..23: mol_type = other DNA
tctcctcacaactcccacggtgg

SEQ ID NO: 47 - DNA, 23 bp, synthetic construct
  source 1..23: mol_type = other DNA
gtggtcctattatgttgatgtgg

SEQ ID NO: 48 - DNA, 23 bp, synthetic construct
  source 1..23: mol_type = other DNA
cttggaaccggggccactgtggg

SEQ ID NO: 49 - DNA, 23 bp, synthetic construct
  source 1..23: mol_type = other DNA
acagaggctccttctgaacaagg

SEQ ID NO: 50 - DNA, 23 bp, synthetic construct
  source 1..23: mol_type = other DNA
ggaccaccgtgggagttgtgagg

SEQ ID NO: 51 - DNA, 23 bp, synthetic construct
  source 1..23: mol_type = other DNA
caccaacggagcaaagccccggg

SEQ ID NO: 52 - DNA, 23 bp, synthetic construct
  source 1..23: mol_type = other DNA
gttggtgctgaaattcaaagagg

SEQ ID NO: 53 - DNA, 23 bp, synthetic construct
  source 1..23: mol_type = other DNA
caaggactaatctcagcatctgg

SEQ ID NO: 54 - DNA, 23 bp, synthetic construct
  source 1..23: mol_type = other DNA
tagtccttggtgttataccatgg

SEQ ID NO: 55 - DNA, 23 bp, synthetic construct
  source 1..23: mol_type = other DNA
ttcttaccttgttcagaaggagg

SEQ ID NO: 56 - DNA, 23 bp, synthetic construct
  source 1..23: mol_type = other DNA
ctagggcctccttctgaacaagg

SEQ ID NO: 57 - DNA, 23 bp, synthetic construct
  source 1..23: mol_type = other DNA
ggctccttaccttgttcagaagg

SEQ ID NO: 58 - DNA, 23 bp, synthetic construct
  source 1..23: mol_type = other DNA
tgaacaaggtaaggagcctgtgg

SEQ ID NO: 59 - DNA, 23 bp, synthetic construct
  source 1..23: mol_type = other DNA
ctgtcaccaggcattgtgtcagg

SEQ ID NO: 60 - DNA, 23 bp, synthetic construct
  source 1..23: mol_type = other DNA
aagtgtccttgcaactctcacgg

SEQ ID NO: 61 - DNA, 23 bp, synthetic construct
  source 1..23: mol_type = other DNA
ctgtgtctgagcatcgcgtcagg

SEQ ID NO: 62 - DNA, 23 bp, synthetic construct
  source 1..23: mol_type = other DNA
ctcagacacagaagggactgtgg

SEQ ID NO: 63 - DNA, 23 bp, synthetic construct
  source 1..23: mol_type = other DNA
aagcctctgtgcttggatctggg

SEQ ID NO: 64 - DNA, 23 bp, synthetic construct
  source 1..23: mol_type = other DNA
aggcttcttctgaagaaggtagg

SEQ ID NO: 65 - DNA, 23 bp, synthetic construct
  source 1..23: mol_type = other DNA
gcaccaacggagcaaagccccgg

SEQ ID NO: 66 - DNA, 23 bp, synthetic construct
  source 1..23: mol_type = other DNA
caccaactgaaaacagcactggg

SEQ ID NO: 67 - DNA, 23 bp, synthetic construct
  source 1..23: mol_type = other DNA
accccagtgctgttttcagttgg

SEQ ID NO: 68 - DNA, 23 bp, synthetic construct
  source 1..23: mol_type = other DNA
gttgtcctctgatgccagtgtgg

SEQ ID NO: 69 - DNA, 23 bp, synthetic construct
  source 1..23: mol_type = other DNA
cggatcggttgtgtaacaccagg

SEQ ID NO: 70 - DNA, 23 bp, synthetic construct
  source 1..23: mol_type = other DNA
aaccgatccgtgtgtgaggtggg

SEQ ID NO: 71 - DNA, 23 bp, synthetic construct
  source 1..23: mol_type = other DNA
cttgttcagaaggaggccctagg

SEQ ID NO: 72 - DNA, 23 bp, synthetic construct
  source 1..23: mol_type = other DNA
ggagcaaagccccacagtccagg

SEQ ID NO: 73 - DNA, 23 bp, synthetic construct
  source 1..23: mol_type = other DNA
cttgttcaaaaaaagcctctagg

SEQ ID NO: 74 - DNA, 23 bp, synthetic construct
  source 1..23: mol_type = other DNA
gcttggaaccggggccactgtgg

SEQ ID NO: 75 - DNA, 23 bp, synthetic construct
  source 1..23: mol_type = other DNA
cttggaacctggatgacagtcgg

SEQ ID NO: 76 - DNA, 23 bp, synthetic construct
  source 1..23: mol_type = other DNA
ccatggatcccaatgtcagatgg

SEQ ID NO: 77 - DNA, 23 bp, synthetic construct
  source 1..23: mol_type = other DNA
cttggagccagaataacattcgg

SEQ ID NO: 78 - DNA, 23 bp, synthetic construct
  source 1..23: mol_type = other DNA
gtggttctctgatgccagtgtgg

SEQ ID NO: 79 - DNA, 23 bp, synthetic construct
  source 1..23: mol_type = other DNA
ccacagaatactacccaaatggg

SEQ ID NO: 80 - DNA, 23 bp, synthetic construct
  source 1..23: mol_type = other DNA
gaggccctaggcttggaacctgg

SEQ ID NO: 81 - DNA, 23 bp, synthetic construct
  source 1..23: mol_type = other DNA
tcagaaggaggccctaggcttgg

SEQ ID NO: 82 - DNA, 23 bp, synthetic construct
  source 1..23: mol_type = other DNA
ccatctgacattgggatccatgg

SEQ ID NO: 83 - DNA, 23 bp, synthetic construct
  source 1..23: mol_type = other DNA
catggatcccaatgtcagatggg

SEQ ID NO: 84 - DNA, 23 bp, synthetic construct
  source 1..23: mol_type = other DNA
tgaaaacagcactggggtccagg

SEQ ID NO: 85 - DNA, 23 bp, synthetic construct
  source 1..23: mol_type = other DNA
acaacagaatattatccaaatgg

SEQ ID NO: 86 - DNA, 23 bp, synthetic construct
  source 1..23: mol_type = other DNA
gcttggaactgggaccaccgtgg

SEQ ID NO: 87 - DNA, 23 bp, synthetic construct
  source 1..23: mol_type = other DNA
acagaggcttcttctgaagaagg

SEQ ID NO: 88 - DNA, 23 bp, synthetic construct
  source 1..23: mol_type = other DNA
aggacactcgattctgtcactgg

SEQ ID NO: 89 - DNA, 23 bp, synthetic construct
  source 1..23: mol_type = other DNA
cacaactcccacagtggccccgg

SEQ ID NO: 90 - DNA, 23 bp, synthetic construct
  source 1..23: mol_type = other DNA
ggagcaaagccccggggtccagg

SEQ ID NO: 91 - DNA, 23 bp, synthetic construct
  source 1..23: mol_type = other DNA
ggaagctctgtgcttggaactgg

SEQ ID NO: 92 - DNA, 23 bp, synthetic construct
  source 1..23: mol_type = other DNA
atgccagtgtggtgtcatagagg

SEQ ID NO: 93 - DNA, 23 bp, synthetic construct
  source 1..23: mol_type = other DNA
accacagaatactacccaaatgg

SEQ ID NO: 94 - DNA, 23 bp, synthetic construct
  source 1..23: mol_type = other DNA
tcgcccttggtgttacaccatgg

SEQ ID NO: 95 - DNA, 23 bp, synthetic construct
  source 1..23: mol_type = other DNA
caagggcgaatctcagcatctgg

SEQ ID NO: 96 - DNA, 23 bp, synthetic construct
  source 1..23: mol_type = other DNA
tttctggggtccgactatgctgg

SEQ ID NO: 97 - DNA, 23 bp, synthetic construct
  source 1..23: mol_type = other DNA
tgacaccacaccagcatagtcgg

SEQ ID NO: 98 - DNA, 23 bp, synthetic construct
  source 1..23: mol_type = other DNA
gaacaacagtgggagtctctagg

SEQ ID NO: 99 - DNA, 23 bp, synthetic construct
  source 1..23: mol_type = other DNA
tgttccagttccaagcatggagg

SEQ ID NO: 100 - DNA, 23 bp, synthetic construct
  source 1..23: mol_type = other DNA
catggatcccagtgtcagatggg

SEQ ID NO: 101 - DNA, 23 bp, synthetic construct
  source 1..23: mol_type = other DNA
gatccatggtataacaccaaggg

SEQ ID NO: 102 - DNA, 23 bp, synthetic construct
  source 1..23: mol_type = other DNA
tgttgttccagttccaagcatgg

SEQ ID NO: 103 - DNA, 23 bp, synthetic construct
  source 1..23: mol_type = other DNA
tctttgaatttcagcaccaacgg

SEQ ID NO: 104 - DNA, 23 bp, synthetic construct
  source 1..23: mol_type = other DNA
agcctctaggcttggaatcgggg

SEQ ID NO: 105 - DNA, 23 bp, synthetic construct
  source 1..23: mol_type = other DNA
ggctccttctgaacaaggtaagg

SEQ ID NO: 106 - DNA, 23 bp, synthetic construct
  source 1..23: mol_type = other DNA
tcagaaggaagctctgtgcttgg

SEQ ID NO: 107 - DNA, 23 bp, synthetic construct
  source 1..23: mol_type = other DNA
gatccctcgtataacaataaggg

SEQ ID NO: 108 - DNA, 23 bp, synthetic construct
  source 1..23: mol_type = other DNA
gagggatcccagtgtcaggtggg

SEQ ID NO: 109 - DNA, 23 bp, synthetic construct
  source 1..23: mol_type = other DNA
cttggaactggaacaacagtggg

SEQ ID NO: 110 - DNA, 23 bp, synthetic construct
  source 1..23: mol_type = other DNA
atggaggctcattctgaagcagg

SEQ ID NO: 111 - DNA, 23 bp, synthetic construct
  source 1..23: mol_type = other DNA
ggacacttgattctgtcaccagg

SEQ ID NO: 112 - DNA, 23 bp, synthetic construct
  source 1..23: mol_type = other DNA
tgtccttgcaactctcacggtgg

SEQ ID NO: 113 - DNA, 23 bp, synthetic construct
  source 1..23: mol_type = other DNA
ggggtccgactatgctggtgtgg

SEQ ID NO: 114 - DNA, 23 bp, synthetic construct
  source 1..23: mol_type = other DNA
atccctcgtataacaataagggg

SEQ ID NO: 115 - DNA, 23 bp, synthetic construct
  source 1..23: mol_type = other DNA
gaagctctgtgcttggaactggg

SEQ ID NO: 116 - DNA, 23 bp, synthetic construct
  source 1..23: mol_type = other DNA
tcaaaaaaagcctctaggcttgg

SEQ ID NO: 117 - DNA, 23 bp, synthetic construct
  source 1..23: mol_type = other DNA
tcgcccttggtgttataccatgg

SEQ ID NO: 118 - DNA, 23 bp, synthetic construct
  source 1..23: mol_type = other DNA
ggagcctctaggcttggaatcgg

SEQ ID NO: 119 - DNA, 23 bp, synthetic construct
  source 1..23: mol_type = other DNA
acaccatggatcccagtgtcagg

SEQ ID NO: 120 - DNA, 23 bp, synthetic construct
  source 1..23: mol_type = other DNA
gagcctctaggcttggaatcggg

SEQ ID NO: 121 - DNA, 23 bp, synthetic construct
  source 1..23: mol_type = other DNA
tttcagcaccgactgagcagagg

SEQ ID NO: 122 - DNA, 23 bp, synthetic construct
  source 1..23: mol_type = other DNA
accccaggcctctgctcagtcgg

SEQ ID NO: 123 - DNA, 23 bp, synthetic construct
  source 1..23: mol_type = other DNA
caccgactgagcagaggcctggg

SEQ ID NO: 124 - DNA, 23 bp, synthetic construct
  source 1..23: mol_type = other DNA
cgagggatcccagtgtcaggtgg

SEQ ID NO: 125 - DNA, 23 bp, synthetic construct
  source 1..23: mol_type = other DNA
taacaataaggggctgccacagg

SEQ ID NO: 126 - DNA, 23 bp, synthetic construct
  source 1..23: mol_type = other DNA
accgactgagcagaggcctgggg

SEQ ID NO: 127 - DNA, 23 bp, synthetic construct
  source 1..23: mol_type = other DNA
gcaggttcttccagtgacagtgg

SEQ ID NO: 128 - DNA, 23 bp, synthetic construct
  source 1..23: mol_type = other DNA
ctggaagaacctgccaagcttgg

SEQ ID NO: 129 - DNA, 23 bp, synthetic construct
  source 1..23: mol_type = other DNA
gcaccgactgagcagaggcctgg

SEQ ID NO: 130 - DNA, 23 bp, synthetic construct
  source 1..23: mol_type = other DNA
tttcagcaccgactgagcaaagg

SEQ ID NO: 131 - DNA, 23 bp, synthetic construct
  source 1..23: mol_type = other DNA
cggtgctgaaatgaaaacacggg

SEQ ID NO: 132 - DNA, 23 bp, synthetic construct
  source 1..23: mol_type = other DNA
caccgactgagcaaaggcctggg

SEQ ID NO: 133 - DNA, 23 bp, synthetic construct
  source 1..23: mol_type = other DNA
ggtaacagtcggaggcgcgacgg

SEQ ID NO: 134 - DNA, 23 bp, synthetic construct
  source 1..23: mol_type = other DNA
taccccggttccaagcctagagg

SEQ ID NO: 135 - DNA, 23 bp, synthetic construct
  source 1..23: mol_type = other DNA
tggattcctgcagtagttcctgg

SEQ ID NO: 136 - DNA, 23 bp, synthetic construct
  source 1..23: mol_type = other DNA
cagatgctgagattagtccttgg

SEQ ID NO: 137 - DNA, 23 bp, synthetic construct
  source 1..23: mol_type = other DNA
cagatgctgagattcgcccttgg

SEQ ID NO: 138 - DNA, 23 bp, synthetic construct
  source 1..23: mol_type = other DNA
gcaccgactgagcaaaggcctgg

SEQ ID NO: 139 - DNA, 23 bp, synthetic construct
  source 1..23: mol_type = other DNA
agttcttcctgtgacagtggtgg

SEQ ID NO: 140 - DNA, 23 bp, synthetic construct
  source 1..23: mol_type = other DNA
caggaagaacttgccaagcttgg

SEQ ID NO: 141 - DNA, 23 bp, synthetic construct
  source 1..23: mol_type = other DNA
tctccaccactgtcacaggaagg

SEQ ID NO: 142 - DNA, 23 bp, synthetic construct
  source 1..23: mol_type = other DNA
agaatgtgcctcgataactctgg

SEQ ID NO: 143 - DNA, 23 bp, synthetic construct
  source 1..23: mol_type = other DNA
ggatccctcgtataacaataagg

SEQ ID NO: 144 - DNA, 23 bp, synthetic construct
  source 1..23: mol_type = other DNA
ggggtccgactatgcgagtgtgg

SEQ ID NO: 145 - DNA, 23 bp, synthetic construct
  source 1..23: mol_type = other DNA
tgacaccacactcgcatagtcgg

SEQ ID NO: 146 - DNA, 23 bp, synthetic construct
  source 1..23: mol_type = other DNA
gagggatcccggtgtcaggtggg

SEQ ID NO: 147 - DNA, 23 bp, synthetic construct
  source 1..23: mol_type = other DNA
gcaggtccttcctgtgacagtgg

SEQ ID NO: 148 - DNA, 23 bp, synthetic construct
  source 1..23: mol_type = other DNA
caggaaggacctgccaagcttgg

SEQ ID NO: 149 - DNA, 23 bp, synthetic construct
  source 1..23: mol_type = other DNA
tggattcctgcagtagttctcgg

SEQ ID NO: 150 - DNA, 23 bp, synthetic construct
  source 1..23: mol_type = other DNA
cagattctgggaaacaaccctgg

SEQ ID NO: 151 - DNA, 23 bp, synthetic construct
  source 1..23: mol_type = other DNA
tgagcagaggcctggggtgcagg

SEQ ID NO: 152 - DNA, 23 bp, synthetic construct
  source 1..23: mol_type = other DNA
gcaagttcttcctgtgacagtgg

SEQ ID NO: 153 - DNA, 23 bp, synthetic construct
  source 1..23: mol_type = other DNA
ggtccttcctgtgacagtggtgg

SEQ ID NO: 154 - DNA, 23 bp, synthetic construct
  source 1..23: mol_type = other DNA
gcaggttcttcctgtgacagtgg

SEQ ID NO: 155 - DNA, 23 bp, synthetic construct
  source 1..23: mol_type = other DNA
caggaagaacctgccaagcttgg

SEQ ID NO: 156 - DNA, 23 bp, synthetic construct
  source 1..23: mol_type = other DNA
ggttcttccagtgacagtggtgg

SEQ ID NO: 157 - DNA, 23 bp, synthetic construct
  source 1..23: mol_type = other DNA
ggttcttcctgtgacagtggtgg

SEQ ID NO: 158 - RNA, 76 nt, synthetic construct
  source 1..76: mol_type = other RNA
gttttagagctagaaatagcaagttaaaataaggctagtccgttatcaacttgaaaaagtggcaccgagtcggtgc

SEQ ID NO: 159 - RNA, 86 nt, synthetic construct
  source 1..86: mol_type = other RNA
gtttgagagctatgctggaaacagcatagcaagttcaaataaggctagtccgttatcaacttgaaaaagtggcaccgagtcggtgc

SEQ ID NO: 160 - RNA, 76 nt, synthetic construct; identical to SEQ ID NO: 158
  source 1..76: mol_type = other RNA
  modified_base 1: mod_base = OTHER; note = 2'-O-methyl modified nucleotide
  modified_base 8: mod_base = OTHER; note = 2'-O-methyl modified nucleotide
  modified_base 9: mod_base = OTHER; note = 2'-O-methyl modified nucleotide
  modified_base 10: mod_base = OTHER; note = 2'-O-methyl modified nucleotide
  modified_base 11: mod_base = OTHER; note = 2'-O-methyl modified nucleotide
  modified_base 12: mod_base = OTHER; note = 2'-O-methyl modified nucleotide
  modified_base 14: mod_base = OTHER; note = 2'-O-methyl modified nucleotide
  modified_base 15: mod_base = OTHER; note = 2'-O-methyl modified nucleotide
  modified_base 16: mod_base = OTHER; note = 2'-O-methyl modified nucleotide
  modified_base 17: mod_base = OTHER; note = 2'-O-methyl modified nucleotide
  modified_base 18: mod_base = OTHER; note = 2'-O-methyl modified nucleotide
  modified_base 19: mod_base = OTHER; note = 2'-O-methyl modified nucleotide
  modified_base 20: mod_base = OTHER; note = 2'-O-methyl modified nucleotide
  modified_base 21: mod_base = OTHER; note = 2'-O-methyl modified nucleotide
  modified_base 22: mod_base = OTHER; note = 2'-O-methyl modified nucleotide
  modified_base 26: mod_base = OTHER; note = 2'-O-methyl modified nucleotide
  modified_base 28: mod_base = OTHER; note = 2'-O-methyl modified nucleotide
  modified_base 30: mod_base = OTHER; note = 2'-O-methyl modified nucleotide
  modified_base 32: mod_base = OTHER; note = 2'-O-methyl modified nucleotide
  modified_base 33: mod_base = OTHER; note = 2'-O-methyl modified nucleotide
  modified_base 34: mod_base = OTHER; note = 2'-O-methyl modified nucleotide
  modified_base 35: mod_base = OTHER; note = 2'-O-methyl modified nucleotide
  modified_base 36: mod_base = OTHER; note = 2'-O-methyl modified nucleotide
  modified_base 37: mod_base = OTHER; note = 2'-O-methyl modified nucleotide
  modified_base 40: mod_base = OTHER; note = 2'-O-methyl modified nucleotide
  modified_base 41: mod_base = OTHER; note = 2'-O-methyl modified nucleotide
  modified_base 46: mod_base = OTHER; note = 2'-O-methyl modified nucleotide
  modified_base 47: mod_base = OTHER; note = 2'-O-methyl modified nucleotide
  modified_base 50: mod_base = OTHER; note = 2'-O-methyl modified nucleotide
  modified_base 51: mod_base = OTHER; note = 2'-O-methyl modified nucleotide
  modified_base 52: mod_base = OTHER; note = 2'-O-methyl modified nucleotide
  modified_base 54: mod_base = OTHER; note = 2'-O-methyl modified nucleotide
  modified_base 55: mod_base = OTHER; note = 2'-O-methyl modified nucleotide
  modified_base 56: mod_base = OTHER; note = 2'-O-methyl modified nucleotide
  modified_base 57: mod_base = OTHER; note = 2'-O-methyl modified nucleotide
  modified_base 58: mod_base = OTHER; note = 2'-O-methyl modified nucleotide
  modified_base 59: mod_base = OTHER; note = 2'-O-methyl modified nucleotide
  modified_base 60: mod_base = OTHER; note = 2'-O-methyl modified nucleotide
  modified_base 61: mod_base = OTHER; note = 2'-O-methyl modified nucleotide
  modified_base 63: mod_base = OTHER; note = 2'-O-methyl modified nucleotide
  modified_base 64: mod_base = OTHER; note = 2'-O-methyl modified nucleotide
  modified_base 65: mod_base = OTHER; note = 2'-O-methyl modified nucleotide
  modified_base 66: mod_base = OTHER; note = 2'-O-methyl modified nucleotide
  modified_base 67: mod_base = OTHER; note = 2'-O-methyl modified nucleotide
  modified_base 68: mod_base = OTHER; note = 2'-O-methyl modified nucleotide
  modified_base 69: mod_base = OTHER; note = 2'-O-methyl modified nucleotide
  modified_base 70: mod_base = OTHER; note = 2'-O-methyl modified nucleotide
  modified_base 71: mod_base = OTHER; note = 2'-O-methyl modified nucleotide
  modified_base 72: mod_base = OTHER; note = 2'-O-methyl modified nucleotide
  modified_base 73: mod_base = OTHER; note = 2'-O-methyl modified nucleotide
  modified_base 74: mod_base = OTHER; note = 2'-O-methyl modified nucleotide
  modified_base 75: mod_base = OTHER; note = 2'-O-methyl modified nucleotide
  modified_base 76: mod_base = OTHER; note = 2'-O-methyl modified nucleotide

SEQ ID NO: 161 - RNA, 37 nt, synthetic construct
  source 1..37: mol_type = other RNA
cgcggttctatctagttacgcgttaaaccaactagaa

SEQ ID NO: 162 - RNA, 56 nt, synthetic construct
  source 1..56: mol_type = other RNA
gggtcaggagccccccccctgaacccaggataaccctcaaagtcggggggcaaccc

SEQ ID NO: 163 - RNA, 100 nt, synthetic construct
  source 1..100: mol_type = other RNA
  misc_difference 1: note = 2'-O-methyl modified adenosine, cytidine, uridine, guanosine, unknown or other nucleotide with phosphorothioate linkage
  misc_difference 2: note = 2'-O-methyl modified adenosine, cytidine, uridine, guanosine, unknown or other nucleotide with phosphorothioate linkage
  misc_difference 3: note = 2'-O-methyl modified adenosine, cytidine, uridine, guanosine, unknown or other nucleotide with phosphorothioate linkage
  misc_difference 4: note = a, c, u, g, unknown or other
  misc_difference 5: note = a, c, u, g, unknown or other
  misc_difference 6: note = a, c, u, g, unknown or other
  misc_difference 7: note = a, c, u, g, unknown or other
  misc_difference 8: note = a, c, u, g, unknown or other
  misc_difference 9: note = a, c, u, g, unknown or other
  misc_difference 10: note = a, c, u, g, unknown or other
  misc_difference 11: note = a, c, u, g, unknown or other
  misc_difference 12: note = a, c, u, g, unknown or other
  misc_difference 13: note = a, c, u, g, unknown or other
  misc_difference 14: note = a, c, u, g, unknown or other
  misc_difference 15: note = a, c, u, g, unknown or other
  misc_difference 16: note = a, c, u, g, unknown or other
  misc_difference 17: note = a, c, u, g, unknown or other
  misc_difference 18: note = a, c, u, g, unknown or other
  misc_difference 19: note = a, c, u, g, unknown or other
  misc_difference 20: note = a, c, u, g, unknown or other
  modified_base 21: mod_base = OTHER; note = 2'-O-methyl modified nucleotide
  modified_base 28: mod_base = OTHER; note = 2'-O-methyl modified nucleotide
  modified_base 29: mod_base = OTHER; note = 2'-O-methyl modified nucleotide
  modified_base 30: mod_base = OTHER; note = 2'-O-methyl modified nucleotide
  modified_base 31: mod_base = OTHER; note = 2'-O-methyl modified nucleotide
  modified_base 32: mod_base = OTHER; note = 2'-O-methyl modified nucleotide
  modified_base 34: mod_base = OTHER; note = 2'-O-methyl modified nucleotide
  modified_base 35: mod_base = OTHER; note = 2'-O-methyl modified nucleotide
  modified_base 36: mod_base = OTHER; note = 2'-O-methyl modified nucleotide
  modified_base 37: mod_base = OTHER; note = 2'-O-methyl modified nucleotide
  modified_base 38: mod_base = OTHER; note = 2'-O-methyl modified nucleotide
  modified_base 39: mod_base = OTHER; note = 2'-O-methyl modified nucleotide
  modified_base 40: mod_base = OTHER; note = 2'-O-methyl modified nucleotide
  modified_base 41: mod_base = OTHER; note = 2'-O-methyl modified nucleotide
  modified_base 42: mod_base = OTHER; note = 2'-O-methyl modified nucleotide
  modified_base 46: mod_base = OTHER; note = 2'-O-methyl modified nucleotide
  modified_base 48: mod_base = OTHER; note = 2'-O-methyl modified nucleotide
  modified_base 50: mod_base = OTHER; note = 2'-O-methyl modified nucleotide
  modified_base 52: mod_base = OTHER; note = 2'-O-methyl modified nucleotide
  modified_base 53: mod_base = OTHER; note = 2'-O-methyl modified nucleotide
  modified_base 54: mod_base = OTHER; note = 2'-O-methyl modified nucleotide
  modified_base 55: mod_base = OTHER; note = 2'-O-methyl modified nucleotide
  modified_base 56: mod_base = OTHER; note = 2'-O-methyl modified nucleotide
  modified_base 57: mod_base = OTHER; note = 2'-O-methyl modified nucleotide
  modified_base 60: mod_base = OTHER; note = 2'-O-methyl modified nucleotide
  modified_base 61: mod_base = OTHER; note = 2'-O-methyl modified nucleotide
  modified_base 66: mod_base = OTHER; note = 2'-O-methyl modified nucleotide
  modified_base 67: mod_base = OTHER; note = 2'-O-methyl modified nucleotide
  modified_base 70: mod_base = OTHER; note = 2'-O-methyl modified nucleotide
  modified_base 71: mod_base = OTHER; note = 2'-O-methyl modified nucleotide
  modified_base 72: mod_base = OTHER; note = 2'-O-methyl modified nucleotide
  modified_base 74: mod_base = OTHER; note = 2'-O-methyl modified nucleotide
  modified_base 75: mod_base = OTHER; note = 2'-O-methyl modified nucleotide
  modified_base 76: mod_base = OTHER; note = 2'-O-methyl modified nucleotide
  modified_base 77: mod_base = OTHER; note = 2'-O-methyl modified nucleotide
  modified_base 78: mod_base = OTHER; note = 2'-O-methyl modified nucleotide
  modified_base 79: mod_base = OTHER; note = 2'-O-methyl modified nucleotide
  modified_base 80: mod_base = OTHER; note = 2'-O-methyl modified nucleotide
  modified_base 81: mod_base = OTHER; note = 2'-O-methyl modified nucleotide
  modified_base 83: mod_base = OTHER; note = 2'-O-methyl modified nucleotide
  modified_base 84: mod_base = OTHER; note = 2'-O-methyl modified nucleotide
  modified_base 85: mod_base = OTHER; note = 2'-O-methyl modified nucleotide
  modified_base 86: mod_base = OTHER; note = 2'-O-methyl modified nucleotide
  modified_base 87: mod_base = OTHER; note = 2'-O-methyl modified nucleotide
  modified_base 88: mod_base = OTHER; note = 2'-O-methyl modified nucleotide
  modified_base 89: mod_base = OTHER; note = 2'-O-methyl modified nucleotide
  modified_base 90: mod_base = OTHER; note = 2'-O-methyl modified nucleotide
  modified_base 91: mod_base = OTHER; note = 2'-O-methyl modified nucleotide
  modified_base 92: mod_base = OTHER; note = 2'-O-methyl modified nucleotide
  modified_base 93: mod_base = OTHER; note = 2'-O-methyl modified nucleotide
  modified_base 94: mod_base = OTHER; note = 2'-O-methyl modified nucleotide
  modified_base 95: mod_base = OTHER; note = 2'-O-methyl modified nucleotide
  modified_base 96: mod_base = OTHER; note = 2'-O-methyl modified nucleotide
  modified_base 97: mod_base = OTHER; note = 2'-O-methyl modified nucleotide with phosphorothioate linkage
  modified_base 98: mod_base = OTHER; note = 2'-O-methyl modified nucleotide with phosphorothioate linkage
  modified_base 99: mod_base = OTHER; note = 2'-O-methyl modified nucleotide with phosphorothioate linkage
  modified_base 100: mod_base = OTHER; note = 2'-O-methyl modified nucleotide
nnnnnnnnnnnnnnnnnnnngttttagagctagaaatagcaagttaaaataaggctagtccgttatcaacttgaaaaagtggcaccgagtcggtgctttt

SEQ ID NO: 164 - RNA, 100 nt, synthetic construct
  source 1..100: mol_type = other RNA
ctgtcaccaggcattgtgtcgttttagagctagaaatagcaagttaaaataaggctagtccgttatcaacttgaaaaagtggcaccgagtcggtgctttt

SEQ ID NO: 165 - RNA, 100 nt, synthetic construct
  source 1..100: mol_type = other RNA
gtagtagcagtcctgtacccgttttagagctagaaatagcaagttaaaataaggctagtccgttatcaacttgaaaaagtggcaccgagtcggtgctttt

SEQ ID NO: 166 - RNA, 100 nt, synthetic construct
  source 1..100: mol_type = other RNA
aggacactcgattctgtcacgttttagagctagaaatagcaagttaaaataaggctagtccgttatcaacttgaaaaagtggcaccgagtcggtgctttt

SEQ ID NO: 167 - RNA, 100 nt, synthetic construct
  source 1..100: mol_type = other RNA
ctgtcactggacattgtgtcgttttagagctagaaatagcaagttaaaataaggctagtccgttatcaacttgaaaaagtggcaccgagtcggtgctttt

SEQ ID NO: 168 - RNA, 100 nt, synthetic construct
  source 1..100: mol_type = other RNA
ggagcaaagccccacagtccgttttagagctagaaatagcaagttaaaataaggctagtccgttatcaacttgaaaaagtggcaccgagtcggtgctttt

SEQ ID NO: 169 - RNA, 100 nt, synthetic construct
  source 1..100: mol_type = other RNA
ggagcaaagccccggggtccgttttagagctagaaatagcaagttaaaataaggctagtccgttatcaacttgaaaaagtggcaccgagtcggtgctttt

SEQ ID NO: 170 - RNA, 100 nt, synthetic construct
  source 1..100: mol_type = other RNA
cttggaactgggaccaccgtgttttagagctagaaatagcaagttaaaataaggctagtccgttatcaacttgaaaaagtggcaccgagtcggtgctttt

SEQ ID NO: 171 - RNA, 100 nt, synthetic construct
  source 1..100: mol_type = other RNA
atgccagtgtggtgtcataggttttagagctagaaatagcaagttaaaataaggctagtccgttatcaacttgaaaaagtggcaccgagtcggtgctttt

SEQ ID NO: 172 - RNA, 100 nt, synthetic construct
  source 1..100: mol_type = other RNA
ggagccagaataacattcgggttttagagctagaaatagcaagttaaaataaggctagtccgttatcaacttgaaaaagtggcaccgagtcggtgctttt

SEQ ID NO: 173 - RNA, 100 nt, synthetic construct
  source 1..100: mol_type = other RNA
cagatgctgagattagtcctgttttagagctagaaatagcaagttaaaataaggctagtccgttatcaacttgaaaaagtggcaccgagtcggtgctttt

SEQ ID NO: 174 - RNA, 100 nt, synthetic construct
  source 1..100: mol_type = other RNA
tgacaccacattggcatcgggttttagagctagaaatagcaagttaaaataaggctagtccgttatcaacttgaaaaagtggcaccgagtcggtgctttt

SEQ ID NO: 175 - RNA, 100 nt, synthetic construct
  source 1..100: mol_type = other RNA
catagatgaccaagattgacgttttagagctagaaatagcaagttaaaataaggctagtccgttatcaacttgaaaaagtggcaccgagtcggtgctttt

SEQ ID NO: 176 - RNA, 100 nt, synthetic construct
  source 1..100: mol_type = other RNA
ccatcactggacattgcgtcgttttagagctagaaatagcaagttaaaataaggctagtccgttatcaacttgaaaaagtggcaccgagtcggtgctttt

SEQ ID NO: 177 - RNA, 100 nt, synthetic construct
  source 1..100: mol_type = other RNA
ctgcatctgagcatcgtgtcgttttagagctagaaatagcaagttaaaataaggctagtccgttatcaacttgaaaaagtggcaccgagtcggtgctttt

SEQ ID NO: 178 - RNA, 100 nt, synthetic construct
  source 1..100: mol_type = other RNA
aaacagccgtggacgtcgcagttttagagctagaaatagcaagttaaaataaggctagtccgttatcaacttgaaaaagtggcaccgagtcggtgctttt

SEQ ID NO: 179 - RNA, 100 nt, synthetic construct
  source 1..100: mol_type = other RNA
acagaggctccttctgaacagttttagagctagaaatagcaagttaaaataaggctagtccgttatcaacttgaaaaagtggcaccgagtcggtgctttt

SEQ ID NO: 180 - RNA, 100 nt, synthetic construct
  source 1..100: mol_type = other RNA
ctatgacaccacattggcatgttttagagctagaaatagcaagttaaaataaggctagtccgttatcaacttgaaaaagtggcaccgagtcggtgctttt

SEQ ID NO: 181 - RNA, 100 nt, synthetic construct
  source 1..100: mol_type = other RNA
aataacattcggagggacgagttttagagctagaaatagcaagttaaaataaggctagtccgttatcaacttgaaaaagtggcaccgagtcggtgctttt

SEQ ID NO: 182 - RNA, 100 nt, synthetic construct
  source 1..100: mol_type = other RNA
gaacaacagtgggagtctctgttttagagctagaaatagcaagttaaaataaggctagtccgttatcaacttgaaaaagtggcaccgagtcggtgctttt

SEQ ID NO: 183 - RNA, 100 nt, synthetic construct
  source 1..100: mol_type = other RNA
aagcctctgtgcttggatctgttttagagctagaaatagcaagttaaaataaggctagtccgttatcaacttgaaaaagtggcaccgagtcggtgctttt

SEQ ID NO: 184 - RNA, 100 nt, synthetic construct
  source 1..100: mol_type = other RNA
ctagggcctccttctgaacagttttagagctagaaatagcaagttaaaataaggctagtccgttatcaacttgaaaaagtggcaccgagtcggtgctttt

SEQ ID NO: 185 - RNA, 100 nt, synthetic construct
  source 1..100: mol_type = other RNA
tgttgttccagttccaagcagttttagagctagaaatagcaagttaaaataaggctagtccgttatcaacttgaaaaagtggcaccgagtcggtgctttt

SEQ ID NO: 186 - RNA, 100 nt, synthetic construct
  source 1..100: mol_type = other RNA
cttggaaccggggccactgtgttttagagctagaaatagcaagttaaaataaggctagtccgttatcaacttgaaaaagtggcaccgagtcggtgctttt

SEQ ID NO: 187 - RNA, 100 nt, synthetic construct
  source 1..100: mol_type = other RNA
acatacttcattactgtcacgttttagagctagaaatagcaagttaaaataaggctagtccgttatcaacttgaaaaagtggcaccgagtcggtgctttt

SEQ ID NO: 188 - RNA, 100 nt, synthetic construct
  source 1..100: mol_type = other RNA
taccccggttccaagcctaggttttagagctagaaatagcaagttaaaataaggctagtccgttatcaacttgaaaaagtggcaccgagtcggtgctttt

SEQ ID NO: 189 - RNA, 100 nt, synthetic construct
  source 1..100: mol_type = other RNA
caggaaggacctgccaagctgttttagagctagaaatagcaagttaaaataaggctagtccgttatcaacttgaaaaagtggcaccgagtcggtgctttt

SEQ ID NO: 190 - RNA, 100 nt, synthetic construct
  source 1..100: mol_type = other RNA
acaacagaatattatccaaagttttagagctagaaatagcaagttaaaataaggctagtccgttatcaacttgaaaaagtggcaccgagtcggtgctttt

SEQ ID NO: 191 - RNA, 100 nt, synthetic construct
  source 1..100: mol_type = other RNA
ggaccaccgtgagagttgcagttttagagctagaaatagcaagttaaaataaggctagtccgttatcaacttgaaaaagtggcaccgagtcggtgctttt

SEQ ID NO: 192 - RNA, 100 nt, synthetic construct
  source 1..100: mol_type = other RNA
aggagagttgattccatcacgttttagagctagaaatagcaagttaaaataaggctagtccgttatcaacttgaaaaagtggcaccgagtcggtgctttt

SEQ ID NO: 193 - RNA, 100 nt, synthetic construct
  source 1..100: mol_type = other RNA
gtggttctctgatgccagtggttttagagctagaaatagcaagttaaaataaggctagtccgttatcaacttgaaaaagtggcaccgagtcggtgctttt

SEQ ID NO: 194 - RNA, 100 nt, synthetic construct
  source 1..100: mol_type = other RNA
accacagaatactacccaaagttttagagctagaaatagcaagttaaaataaggctagtccgttatcaacttgaaaaagtggcaccgagtcggtgctttt

SEQ ID NO: 195 - RNA, 100 nt, synthetic construct
  source 1..100: mol_type = other RNA
acagaggcttcttctgaagagttttagagctagaaatagcaagttaaaataaggctagtccgttatcaacttgaaaaagtggcaccgagtcggtgctttt

SEQ ID NO: 196 - RNA, 100 nt, synthetic construct
  source 1..100: mol_type = other RNA
tagtccttggtgttataccagttttagagctagaaatagcaagttaaaataaggctagtccgttatcaacttgaaaaagtggcaccgagtcggtgctttt

SEQ ID NO: 197 - RNA, 100 nt, synthetic construct
  source 1..100: mol_type = other RNA
caccaacggagcaaagccccgttttagagctagaaatagcaagttaaaataaggctagtccgttatcaacttgaaaaagtggcaccgagtcggtgctttt

SEQ ID NO: 198 - RNA, 100 nt, synthetic construct
  source 1..100: mol_type = other RNA
gttgtcctctgatgccagtggttttagagctagaaatagcaagttaaaataaggctagtccgttatcaacttgaaaaagtggcaccgagtcggtgctttt

SEQ ID NO: 199 - RNA, 100 nt, synthetic construct
  source 1..100: mol_type = other RNA
tgacaccacatcaacataatgttttagagctagaaatagcaagttaaaataaggctagtccgttatcaacttgaaaaagtggcaccgagtcggtgctttt

SEQ ID NO: 200 - RNA, 100 nt, synthetic construct
  source 1..100: mol_type = other RNA
cggatcggttgtgtaacaccgttttagagctagaaatagcaagttaaaataaggctagtccgttatcaacttgaaaaagtggcaccgagtcggtgctttt

SEQ ID NO: 201 - RNA, 100 nt, synthetic construct
  source 1..100: mol_type = other RNA
tcgcccttggtgttacaccagttttagagctagaaatagcaagttaaaataaggctagtccgttatcaacttgaaaaagtggcaccgagtcggtgctttt

SEQ ID NO: 202 - RNA, 100 nt, synthetic construct
  source 1..100: mol_type = other RNA
caggaagaacctgccaagctgttttagagctagaaatagcaagttaaaataaggctagtccgttatcaacttgaaaaagtggcaccgagtcggtgctttt

SEQ ID NO: 203 - RNA, 100 nt, synthetic construct
  source 1..100: mol_type = other RNA
ggtaatagttggaggcgcgagttttagagctagaaatagcaagttaaaataaggctagtccgttatcaacttgaaaaagtggcaccgagtcggtgctttt

SEQ ID NO: 204 - RNA, 100 nt, synthetic construct
  source 1..100: mol_type = other RNA
actgtggggctttgctccgtgttttagagctagaaatagcaagttaaaataaggctagtccgttatcaacttgaaaaagtggcaccgagtcggtgctttt

SEQ ID NO: 205 - RNA, 100 nt, synthetic construct
  source 1..100: mol_type = other RNA
ctgtgtctgagcatcgcgtcgttttagagctagaaatagcaagttaaaataaggctagtccgttatcaacttgaaaaagtggcaccgagtcggtgctttt

SEQ ID NO: 206 - RNA, 100 nt, synthetic construct
  source 1..100: mol_type = other RNA
catggatcccagtgtcagatgttttagagctagaaatagcaagttaaaataaggctagtccgttatcaacttgaaaaagtggcaccgagtcggtgctttt

SEQ ID NO: 207 - RNA, 100 nt, synthetic construct
  source 1..100: mol_type = other RNA
gcaccaacggagcaaagcccgttttagagctagaaatagcaagttaaaataaggctagtccgttatcaacttgaaaaagtggcaccgagtcggtgctttt

SEQ ID NO: 208 - RNA, 100 nt, synthetic construct
  source 1..100: mol_type = other RNA
tgaaaacagcactggggtccgttttagagctagaaatagcaagttaaaataaggctagtccgttatcaacttgaaaaagtggcaccgagtcggtgctttt

SEQ ID NO: 209 - RNA, 100 nt, synthetic construct
  source 1..100: mol_type = other RNA
aactcaaggttgtacccattgttttagagctagaaatagcaagttaaaataaggctagtccgttatcaacttgaaaaagtggcaccgagtcggtgctttt

SEQ ID NO: 210 - RNA, 100 nt, synthetic construct
  source 1..100: mol_type = other RNA
gggatcctccgatgccaatggttttagagctagaaatagcaagttaaaataaggctagtccgttatcaacttgaaaaagtggcaccgagtcggtgctttt

SEQ ID NO: 211 - RNA, 100 nt, synthetic construct
  source 1..100: mol_type = other RNA
ctacttagaagctgaaacgtgttttagagctagaaatagcaagttaaaataaggctagtccgttatcaacttgaaaaagtggcaccgagtcggtgctttt

SEQ ID NO: 212 - RNA, 100 nt, synthetic construct
  source 1..100: mol_type = other RNA
ggctccttaccttgttcagagttttagagctagaaatagcaagttaaaataaggctagtccgttatcaacttgaaaaagtggcaccgagtcggtgctttt

SEQ ID NO: 213 - RNA, 100 nt, synthetic construct
  source 1..100: mol_type = other RNA
cctacttagaagctgaaacggttttagagctagaaatagcaagttaaaataaggctagtccgttatcaacttgaaaaagtggcaccgagtcggtgctttt

SEQ ID NO: 214 - RNA, 100 nt, synthetic construct
  source 1..100: mol_type = other RNA
ggggtccgactatgctggtggttttagagctagaaatagcaagttaaaataaggctagtccgttatcaacttgaaaaagtggcaccgagtcggtgctttt

SEQ ID NO: 215 - RNA, 100 nt, synthetic construct
  source 1..100: mol_type = other RNA
caccaactgaaaacagcactgttttagagctagaaatagcaagttaaaataaggctagtccgttatcaacttgaaaaagtggcaccgagtcggtgctttt

SEQ ID NO: 216 - RNA, 100 nt, synthetic construct
  source 1..100: mol_type = other RNA
tttctggggtccgactatgcgttttagagctagaaatagcaagttaaaataaggctagtccgttatcaacttgaaaaagtggcaccgagtcggtgctttt

SEQ ID NO: 217 - RNA, 100 nt, synthetic construct
  source 1..100: mol_type = other RNA
tctttgaatttcagcaccaagttttagagctagaaatagcaagttaaaataaggctagtccgttatcaacttgaaaaagtggcaccgagtcggtgctttt

SEQ ID NO: 218 - RNA, 100 nt, synthetic construct
  source 1..100: mol_type = other RNA
gtggtcctattatgttgatggttttagagctagaaatagcaagttaaaataaggctagtccgttatcaacttgaaaaagtggcaccgagtcggtgctttt

SEQ ID NO: 219 - RNA, 100 nt, synthetic construct
  source 1..100: mol_type = other RNA
ccatctgacattgggatccagttttagagctagaaatagcaagttaaaataaggctagtccgttatcaacttgaaaaagtggcaccgagtcggtgctttt

SEQ ID NO: 220 - RNA, 100 nt, synthetic construct
  source 1..100: mol_type = other RNA
tccacggctgtttctgaacagttttagagctagaaatagcaagttaaaataaggctagtccgttatcaacttgaaaaagtggcaccgagtcggtgctttt

SEQ ID NO: 221 - RNA, 100 nt, synthetic construct
  source 1..100: mol_type = other RNA
tggaccacatggctttgctcgttttagagctagaaatagcaagttaaaataaggctagtccgttatcaacttgaaaaagtggcaccgagtcggtgctttt

SEQ ID NO: 222 - RNA, 100 nt, synthetic construct
  source 1..100: mol_type = other RNA
tgtccttgcaactctcacgggttttagagctagaaatagcaagttaaaataaggctagtccgttatcaacttgaaaaagtggcaccgagtcggtgctttt

SEQ ID NO: 223 - RNA, 100 nt, synthetic construct
  source 1..100: mol_type = other RNA
cattatggacagagttaccggttttagagctagaaatagcaagttaaaataaggctagtccgttatcaacttgaaaaagtggcaccgagtcggtgctttt

SEQ ID NO: 224 - RNA, 100 nt, synthetic construct
  source 1..100: mol_type = other RNA
cacaactcccacagtggcccgttttagagctagaaatagcaagttaaaataaggctagtccgttatcaacttgaaaaagtggcaccgagtcggtgctttt

SEQ ID NO: 225 - RNA, 100 nt, synthetic construct
  source 1..100: mol_type = other RNA
aagtgtccttgcgacgtccagttttagagctagaaatagcaagttaaaataaggctagtccgttatcaacttgaaaaagtggcaccgagtcggtgctttt

SEQ ID NO: 226 - RNA, 100 nt, synthetic construct
  source 1..100: mol_type = other RNA
gttggtgctgaaattcaaaggttttagagctagaaatagcaagttaaaataaggctagtccgttatcaacttgaaaaagtggcaccgagtcggtgctttt

SEQ ID NO: 227 - RNA, 100 nt, synthetic construct
  source 1..100: mol_type = other RNA
acagagcttccttctgaagagttttagagctagaaatagcaagttaaaataaggctagtccgttatcaacttgaaaaagtggcaccgagtcggtgctttt

SEQ ID NO: 228 - RNA, 100 nt, synthetic construct
  source 1..100: mol_type = other RNA
ctagaggctttttttgaacagttttagagctagaaatagcaagttaaaataaggctagtccgttatcaacttgaaaaagtggcaccgagtcggtgctttt

SEQ ID NO: 229 - RNA, 100 nt, synthetic construct
  source 1..100: mol_type = other RNA
tggattcctgcagtagttccgttttagagctagaaatagcaagttaaaataaggctagtccgttatcaacttgaaaaagtggcaccgagtcggtgctttt

SEQ ID NO: 230 - RNA, 100 nt, synthetic construct
  source 1..100: mol_type = other RNA
acatgttcttcctgtgataggttttagagctagaaatagcaagttaaaataaggctagtccgttatcaacttgaaaaagtggcaccgagtcggtgctttt

SEQ ID NO: 231 - RNA, 100 nt, synthetic construct
  source 1..100: mol_type = other RNA
tgataccacactggcatcaggttttagagctagaaatagcaagttaaaataaggctagtccgttatcaacttgaaaaagtggcaccgagtcggtgctttt

SEQ ID NO: 232 - RNA, 100 nt, synthetic construct
  source 1..100: mol_type = other RNA
aactctcctcacaactcccagttttagagctagaaatagcaagttaaaataaggctagtccgttatcaacttgaaaaagtggcaccgagtcggtgctttt

SEQ ID NO: 233 - RNA, 100 nt, synthetic construct
  source 1..100: mol_type = other RNA
cgtccctccgaatgttattcgttttagagctagaaatagcaagttaaaataaggctagtccgttatcaacttgaaaaagtggcaccgagtcggtgctttt

SEQ ID NO: 234 - RNA, 100 nt, synthetic construct
  source 1..100: mol_type = other RNA
tgaacaaggtaagaagtctcgttttagagctagaaatagcaagttaaaataaggctagtccgttatcaacttgaaaaagtggcaccgagtcggtgctttt

SEQ ID NO: 235 - RNA, 100 nt, synthetic construct
  source 1..100: mol_type = other RNA
gcttggaaccggggccactggttttagagctagaaatagcaagttaaaataaggctagtccgttatcaacttgaaaaagtggcaccgagtcggtgctttt

SEQ ID NO: 236 - RNA, 100 nt, synthetic construct
  source 1..100: mol_type = other RNA
tattctggctccaagcctaggttttagagctagaaatagcaagttaaaataaggctagtccgttatcaacttgaaaaagtggcaccgagtcggtgctttt

SEQ ID NO: 237 - RNA, 100 nt, synthetic construct
  source 1..100: mol_type = other RNA
tgttccagttccaagcatgggttttagagctagaaatagcaagttaaaataaggctagtccgttatcaacttgaaaaagtggcaccgagtcggtgctttt

SEQ ID NO: 238 - RNA, 100 nt, synthetic construct
  source 1..100: mol_type = other RNA
aggcttcttctgaagaaggtgttttagagctagaaatagcaagttaaaataaggctagtccgttatcaacttgaaaaagtggcaccgagtcggtgctttt

SEQ ID NO: 239 - RNA, 100 nt, synthetic construct
  source 1..100: mol_type = other RNA
cttggaacctggatgacagtgttttagagctagaaatagcaagttaaaataaggctagtccgttatcaacttgaaaaagtggcaccgagtcggtgctttt

SEQ ID NO: 240 - RNA, 100 nt, synthetic construct
  source 1..100: mol_type = other RNA
gataactctgtccatttccggttttagagctagaaatagcaagttaaaataaggctagtccgttatcaacttgaaaaagtggcaccgagtcggtgctttt

SEQ ID NO: 241 - RNA, 100 nt, synthetic construct
  source 1..100: mol_type = other RNA
ggtaacagtcggaggcgcgagttttagagctagaaatagcaagttaaaataaggctagtccgttatcaacttgaaaaagtggcaccgagtcggtgctttt

SEQ ID NO: 242 - RNA, 100 nt, synthetic construct
  source 1..100: mol_type = other RNA
ggtccttcctgtgacagtgggttttagagctagaaatagcaagttaaaataaggctagtccgttatcaacttgaaaaagtggcaccgagtcggtgctttt

SEQ ID NO: 243 - RNA, 100 nt, synthetic construct
  source 1..100: mol_type = other RNA
ggtcccagatccaagcacaggttttagagctagaaatagcaagttaaaataaggctagtccgttatcaacttgaaaaagtggcaccgagtcggtgctttt

SEQ ID NO: 244 - RNA, 100 nt, synthetic construct
  source 1..100: mol_type = other RNA
tctcctcacaactcccacgggttttagagctagaaatagcaagttaaaataaggctagtccgttatcaacttgaaaaagtggcaccgagtcggtgctttt

SEQ ID NO: 245 - RNA, 100 nt, synthetic construct
  source 1..100: mol_type = other RNA
ccacagaatactacccaaatgttttagagctagaaatagcaagttaaaataaggctagtccgttatcaacttgaaaaagtggcaccgagtcggtgctttt

SEQ ID NO: 246 - RNA, 100 nt, synthetic construct
  source 1..100: mol_type = other RNA
caaggactaatctcagcatcgttttagagctagaaatagcaagttaaaataaggctagtccgttatcaacttgaaaaagtggcaccgagtcggtgctttt

SEQ ID NO: 247 - RNA, 100 nt, synthetic construct
  source 1..100: mol_type = other RNA
caacagaatattatccaaatgttttagagctagaaatagcaagttaaaataaggctagtccgttatcaacttgaaaaagtggcaccgagtcggtgctttt

SEQ ID NO: 248 - RNA, 100 nt, synthetic construct
  source 1..100: mol_type = other RNA
catagatgaccaagcttggcgttttagagctagaaatagcaagttaaaataaggctagtccgttatcaacttgaaaaagtggcaccgagtcggtgctttt

SEQ ID NO: 249 - RNA, 100 nt, synthetic construct
  source 1..100: mol_type = other RNA
aaccgatccgtgtgtgaggtgttttagagctagaaatagcaagttaaaataaggctagtccgttatcaacttgaaaaagtggcaccgagtcggtgctttt

SEQ ID NO: 250 - RNA, 100 nt, synthetic construct
  source 1..100: mol_type = other RNA
caagggcgaatctcagcatcgttttagagctagaaatagcaagttaaaataaggctagtccgttatcaacttgaaaaagtggcaccgagtcggtgctttt

SEQ ID NO: 251 - RNA, 100 nt, synthetic construct
  source 1..100: mol_type = other RNA
ggttcttcctgtgacagtgggttttagagctagaaatagcaagttaaaataaggctagtccgttatcaacttgaaaaagtggcaccgagtcggtgctttt

SEQ ID NO: 252 - RNA, 100 nt, synthetic construct
  source 1..100: mol_type = other RNA
taccccgattccaagcctaggttttagagctagaaatagcaagttaaaataaggctagtccgttatcaacttgaaaaagtggcaccgagtcggtgctttt

SEQ ID NO: 253 - RNA, 100 nt, synthetic construct
  source 1..100: mol_type = other RNA
acagtccaggactgctaccagttttagagctagaaatagcaagttaaaataaggctagtccgttatcaacttgaaaaagtggcaccgagtcggtgctttt

SEQ ID NO: 254 - RNA, 100 nt, synthetic construct
  source 1..100: mol_type = other RNA
ctcagacacagaagggactggttttagagctagaaatagcaagttaaaataaggctagtccgttatcaacttgaaaaagtggcaccgagtcggtgctttt

SEQ ID NO: 255 - RNA, 100 nt, synthetic construct
  source 1..100: mol_type = other RNA
gatccatggtataacaccaagttttagagctagaaatagcaagttaaaataaggctagtccgttatcaacttgaaaaagtggcaccgagtcggtgctttt

SEQ ID NO: 256 - RNA, 100 nt, synthetic construct
  source 1..100: mol_type = other RNA
accccagtgctgttttcagtgttttagagctagaaatagcaagttaaaataaggctagtccgttatcaacttgaaaaagtggcaccgagtcggtgctttt

SEQ ID NO: 257 - RNA, 100 nt, synthetic construct
  source 1..100: mol_type = other RNA
ccacgtttcagcttctaagtgttttagagctagaaatagcaagttaaaataaggctagtccgttatcaacttgaaaaagtggcaccgagtcggtgctttt

SEQ ID NO: 258 - RNA, 100 nt, synthetic construct
  source 1..100: mol_type = other RNA
tgaacaaggtaaggagcctggttttagagctagaaatagcaagttaaaataaggctagtccgttatcaacttgaaaaagtggcaccgagtcggtgctttt

SEQ ID NO: 259 - RNA, 100 nt, synthetic construct
  source 1..100: mol_type = other RNA
tgacaccacaccagcatagtgttttagagctagaaatagcaagttaaaataaggctagtccgttatcaacttgaaaaagtggcaccgagtcggtgctttt

SEQ ID NO: 260 - RNA, 100 nt, synthetic construct
  source 1..100: mol_type = other RNA
catggatcccaatgtcagatgttttagagctagaaatagcaagttaaaataaggctagtccgttatcaacttgaaaaagtggcaccgagtcggtgctttt

SEQ ID NO: 261 - RNA, 100 nt, synthetic construct
  source 1..100: mol_type = other RNA
aggacacttgattctgtcacgttttagagctagaaatagcaagttaaaataaggctagtccgttatcaacttgaaaaagtggcaccgagtcggtgctttt

SEQ ID NO: 262 - RNA, 100 nt, synthetic construct
  source 1..100: mol_type = other RNA
acgtactccaccactgtcacgttttagagctagaaatagcaagttaaaataaggctagtccgttatcaacttgaaaaagtggcaccgagtcggtgctttt

SEQ ID NO: 263 - RNA, 100 nt, synthetic construct
  source 1..100: mol_type = other RNA
gtagcagtcctgtaccccgggttttagagctagaaatagcaagttaaaataaggctagtccgttatcaacttgaaaaagtggcaccgagtcggtgctttt

SEQ ID NO: 264 - RNA, 100 nt, synthetic construct
  source 1..100: mol_type = other RNA
agtagcagtcctgtaccccggttttagagctagaaatagcaagttaaaataaggctagtccgttatcaacttgaaaaagtggcaccgagtcggtgctttt

SEQ ID NO: 265 - RNA, 100 nt, synthetic construct
  source 1..100: mol_type = other RNA
tagtagcagtcctgtaccccgttttagagctagaaatagcaagttaaaataaggctagtccgttatcaacttgaaaaagtggcaccgagtcggtgctttt

SEQ ID NO: 266 - RNA, 100 nt, synthetic construct; identical to SEQ ID NO: 164
  source 1..100: mol_type = other RNA
  modified_base 1: mod_base = OTHER; note = 2'-O-methyl modified nucleotide with phosphorothioate linkage
  modified_base 2: mod_base = OTHER; note = 2'-O-methyl modified nucleotide with phosphorothioate linkage
  modified_base 3: mod_base = OTHER; note = 2'-O-methyl modified nucleotide with phosphorothioate linkage
  modified_base 97: mod_base = OTHER; note = Nucleotide with phosphorothioate linkage
  modified_base 98: mod_base = OTHER; note = 2'-O-methyl modified nucleotide with phosphorothioate linkage
  modified_base 99: mod_base = OTHER; note = 2'-O-methyl modified nucleotide with phosphorothioate linkage
  modified_base 100: mod_base = OTHER; note = 2'-O-methyl modified nucleotide

SEQ ID NO: 267 - RNA, 100 nt, synthetic construct; identical to SEQ ID NO: 164
  source 1..100: mol_type = other RNA
  modified_base 1: mod_base = OTHER; note = 2'-O-methyl modified nucleotide with phosphorothioate linkage
  modified_base 2: mod_base = OTHER; note = 2'-O-methyl modified nucleotide with phosphorothioate linkage
  modified_base 3: mod_base = OTHER; note = 2'-O-methyl modified nucleotide with phosphorothioate linkage
  modified_base 21: mod_base = OTHER; note = 2'-O-methyl modified nucleotide
  modified_base 28: mod_base = OTHER; note = 2'-O-methyl modified nucleotide
  modified_base 29: mod_base = OTHER; note = 2'-O-methyl modified nucleotide
  modified_base 30: mod_base = OTHER; note = 2'-O-methyl modified nucleotide
  modified_base 31: mod_base = OTHER; note = 2'-O-methyl modified nucleotide
  modified_base 32: mod_base = OTHER; note = 2'-O-methyl modified nucleotide
  modified_base 34: mod_base = OTHER; note = 2'-O-methyl modified nucleotide
  modified_base 35: mod_base = OTHER; note = 2'-O-methyl modified nucleotide
  modified_base 36: mod_base = OTHER; note = 2'-O-methyl modified nucleotide
  modified_base 37: mod_base = OTHER; note = 2'-O-methyl modified nucleotide
  modified_base 38: mod_base = OTHER; note = 2'-O-methyl modified nucleotide
  modified_base 39: mod_base = OTHER; note = 2'-O-methyl modified nucleotide
  modified_base 40: mod_base = OTHER; note = 2'-O-methyl modified nucleotide
  modified_base 41: mod_base = OTHER; note = 2'-O-methyl modified nucleotide
  modified_base 42: mod_base = OTHER; note = 2'-O-methyl modified nucleotide
  modified_base 46: mod_base = OTHER; note = 2'-O-methyl modified nucleotide
  modified_base 48: mod_base = OTHER; note = 2'-O-methyl modified nucleotide
  modified_base 50: mod_base = OTHER; note = 2'-O-methyl modified nucleotide
  modified_base 52: mod_base = OTHER; note = 2'-O-methyl modified nucleotide
  modified_base 53: mod_base = OTHER; note = 2'-O-methyl modified nucleotide
  modified_base 54: mod_base = OTHER; note = 2'-O-methyl modified nucleotide
  modified_base 55: mod_base = OTHER; note = 2'-O-methyl modified nucleotide
  modified_base 56: mod_base = OTHER; note = 2'-O-methyl modified nucleotide
  modified_base 57: mod_base = OTHER; note = 2'-O-methyl modified nucleotide
  modified_base 60: mod_base = OTHER; note = 2'-O-methyl modified nucleotide
  modified_base 61: mod_base = OTHER; note = 2'-O-methyl modified nucleotide
  modified_base 66: mod_base = OTHER; note = 2'-O-methyl modified nucleotide
  modified_base 67: mod_base = OTHER; note = 2'-O-methyl modified nucleotide
  modified_base 70: mod_base = OTHER; note = 2'-O-methyl modified nucleotide
  modified_base 71: mod_base = OTHER; note = 2'-O-methyl modified nucleotide
  modified_base 72: mod_base = OTHER; note = 2'-O-methyl modified nucleotide
  modified_base 74: mod_base = OTHER; note = 2'-O-methyl modified nucleotide
  modified_base 75: mod_base = OTHER; note = 2'-O-methyl modified nucleotide
  modified_base 76: mod_base = OTHER; note = 2'-O-methyl modified nucleotide
  modified_base 77: mod_base = OTHER; note = 2'-O-methyl modified nucleotide
  modified_base 78: mod_base = OTHER; note = 2'-O-methyl modified nucleotide
  modified_base 79: mod_base = OTHER; note = 2'-O-methyl modified nucleotide
  modified_base 80: mod_base = OTHER; note = 2'-O-methyl modified nucleotide
  modified_base 81: mod_base = OTHER; note = 2'-O-methyl modified nucleotide
  modified_base 83: mod_base = OTHER; note = 2'-O-methyl modified nucleotide
  modified_base 84: mod_base = OTHER; note = 2'-O-methyl modified nucleotide
  modified_base 85: mod_base = OTHER; note = 2'-O-methyl modified nucleotide
  modified_base 86: mod_base = OTHER; note = 2'-O-methyl modified nucleotide
  modified_base 87: mod_base = OTHER; note = 2'-O-methyl modified nucleotide
  modified_base 88: mod_base = OTHER; note = 2'-O-methyl modified nucleotide
  modified_base 89: mod_base = OTHER; note = 2'-O-methyl modified nucleotide
  modified_base 90: mod_base = OTHER; note = 2'-O-methyl modified nucleotide
  modified_base 91: mod_base = OTHER; note = 2'-O-methyl modified nucleotide
  modified_base 92: mod_base = OTHER; note = 2'-O-methyl modified nucleotide
  modified_base 93: mod_base = OTHER; note = 2'-O-methyl modified nucleotide
  modified_base 94: mod_base = OTHER; note = 2'-O-methyl modified nucleotide
  modified_base 95: mod_base = OTHER; note = 2'-O-methyl modified nucleotide
  modified_base 96: mod_base = OTHER; note = 2'-O-methyl modified nucleotide
  modified_base 97: mod_base = OTHER; note = 2'-O-methyl modified nucleotide with phosphorothioate linkage
  modified_base 98: mod_base = OTHER; note = 2'-O-methyl modified nucleotide with phosphorothioate linkage
  modified_base 99: mod_base = OTHER; note = 2'-O-methyl modified nucleotide with phosphorothioate linkage
  modified_base 100: mod_base = OTHER; note = 2'-O-methyl modified nucleotide

SEQ ID NO: 268 - RNA, 100 nt, synthetic construct; identical to SEQ ID NO: 165
  source 1..100: mol_type = other RNA
  modified_base 1: mod_base = OTHER; note = 2'-O-methyl modified nucleotide with phosphorothioate linkage
  modified_base 2: mod_base = OTHER; note = 2'-O-methyl modified nucleotide with phosphorothioate linkage
  modified_base 3: mod_base = OTHER; note = 2'-O-methyl modified nucleotide with phosphorothioate linkage
  modified_base 97: mod_base = OTHER; note = Nucleotide with phosphorothioate linkage
  modified_base 98: mod_base = OTHER; note = 2'-O-methyl modified nucleotide with phosphorothioate linkage
  modified_base 99: mod_base = OTHER; note = 2'-O-methyl modified nucleotide with phosphorothioate linkage
  modified_base 100: mod_base = OTHER; note = 2'-O-methyl modified nucleotide

SEQ ID NO: 269 - RNA, 100 nt, synthetic construct; identical to SEQ ID NO: 165
  source 1..100: mol_type = other RNA
  modified_base 1: mod_base = OTHER; note = 2'-O-methyl modified nucleotide with phosphorothioate linkage
  modified_base 2: mod_base = OTHER; note = 2'-O-methyl modified nucleotide with phosphorothioate linkage
  modified_base 3: mod_base = OTHER; note = 2'-O-methyl modified nucleotide with phosphorothioate linkage
  modified_base 21: mod_base = OTHER; note = 2'-O-methyl modified nucleotide
  modified_base 28: mod_base = OTHER; note = 2'-O-methyl modified nucleotide
  modified_base 29: mod_base = OTHER; note = 2'-O-methyl modified nucleotide
  modified_base 30: mod_base = OTHER; note = 2'-O-methyl modified nucleotide
  modified_base 31: mod_base = OTHER; note = 2'-O-methyl modified nucleotide
  modified_base 32: mod_base = OTHER; note = 2'-O-methyl modified nucleotide
  modified_base 34: mod_base = OTHER; note = 2'-O-methyl modified nucleotide
  modified_base 35: mod_base = OTHER; note = 2'-O-methyl modified nucleotide
  modified_base 36: mod_base = OTHER; note = 2'-O-methyl modified nucleotide
  modified_base 37: mod_base = OTHER; note = 2'-O-methyl modified nucleotide
  modified_base 38: mod_base = OTHER; note = 2'-O-methyl modified nucleotide
  modified_base 39: mod_base = OTHER; note = 2'-O-methyl modified nucleotide
  modified_base 40: mod_base = OTHER; note = 2'-O-methyl modified nucleotide
  modified_base 41: mod_base = OTHER; note = 2'-O-methyl modified nucleotide
  modified_base 42: mod_base = OTHER; note = 2'-O-methyl modified nucleotide
  modified_base 46: mod_base = OTHER; note = 2'-O-methyl modified nucleotide
  modified_base 48: mod_base = OTHER; note = 2'-O-methyl modified nucleotide
  modified_base 50: mod_base = OTHER; note = 2'-O-methyl modified nucleotide
  modified_base 52: mod_base = OTHER; note = 2'-O-methyl modified nucleotide
  modified_base 53: mod_base = OTHER; note = 2'-O-methyl modified nucleotide
  modified_base 54: mod_base = OTHER; note = 2'-O-methyl modified nucleotide
  modified_base 55: mod_base = OTHER; note = 2'-O-methyl modified nucleotide
  modified_base 56: mod_base = OTHER; note = 2'-O-methyl modified nucleotide
  modified_base 57: mod_base = OTHER; note = 2'-O-methyl modified nucleotide
  modified_base 60: mod_base = OTHER; note = 2'-O-methyl modified nucleotide
  modified_base 61: mod_base = OTHER; note = 2'-O-methyl modified nucleotide
  modified_base 66: mod_base = OTHER; note = 2'-O-methyl modified nucleotide
  modified_base 67: mod_base = OTHER; note = 2'-O-methyl modified nucleotide
  modified_base 70: mod_base = OTHER; note = 2'-O-methyl modified nucleotide
  modified_base 71: mod_base = OTHER; note = 2'-O-methyl modified nucleotide
  modified_base 72: mod_base = OTHER; note = 2'-O-methyl modified nucleotide
  modified_base 74: mod_base = OTHER; note = 2'-O-methyl modified nucleotide
  modified_base 75: mod_base = OTHER; note = 2'-O-methyl modified nucleotide
  modified_base 76: mod_base = OTHER; note = 2'-O-methyl modified nucleotide
  modified_base 77: mod_base = OTHER; note = 2'-O-methyl modified nucleotide
  modified_base 78: mod_base = OTHER; note = 2'-O-methyl modified nucleotide
  modified_base 79: mod_base = OTHER; note = 2'-O-methyl modified nucleotide
  modified_base 80: mod_base = OTHER; note = 2'-O-methyl modified nucleotide
  modified_base 81: mod_base = OTHER; note = 2'-O-methyl modified nucleotide
  modified_base 83: mod_base = OTHER; note = 2'-O-methyl modified nucleotide
  modified_base 84: mod_base = OTHER; note = 2'-O-methyl modified nucleotide
  modified_base 85: mod_base = OTHER; note = 2'-O-methyl modified nucleotide
  modified_base 86: mod_base = OTHER; note = 2'-O-methyl modified nucleotide
  modified_base 87: mod_base = OTHER; note = 2'-O-methyl modified nucleotide
  modified_base 88: mod_base = OTHER; note = 2'-O-methyl modified nucleotide
  modified_base 89: mod_base = OTHER; note = 2'-O-methyl modified nucleotide
  modified_base 90: mod_base = OTHER; note = 2'-O-methyl modified nucleotide
  modified_base 91: mod_base = OTHER; note = 2'-O-methyl modified nucleotide
  modified_base 92: mod_base = OTHER; note = 2'-O-methyl modified nucleotide
  modified_base 93: mod_base = OTHER; note = 2'-O-methyl modified nucleotide
  modified_base 94: mod_base = OTHER; note = 2'-O-methyl modified nucleotide
  modified_base 95: mod_base = OTHER; note = 2'-O-methyl modified nucleotide
  modified_base 96: mod_base = OTHER; note = 2'-O-methyl modified nucleotide
  modified_base 97: mod_base = OTHER; note = 2'-O-methyl modified nucleotide with phosphorothioate linkage
  modified_base 98: mod_base = OTHER; note = 2'-O-methyl modified nucleotide with phosphorothioate linkage
  modified_base 99: mod_base = OTHER; note = 2'-O-methyl modified nucleotide with phosphorothioate linkage
  modified_base 100: mod_base = OTHER; note = 2'-O-methyl modified nucleotide

SEQ ID NO: 270 - RNA, 100 nt, synthetic construct; identical to SEQ ID NO: 166
  source 1..100: mol_type = other RNA
  modified_base 1: mod_base = OTHER; note = 2'-O-methyl modified nucleotide with phosphorothioate linkage
  modified_base 2: mod_base = OTHER; note = 2'-O-methyl modified nucleotide with phosphorothioate linkage
  modified_base 3: mod_base = OTHER; note = 2'-O-methyl modified nucleotide with phosphorothioate linkage
  modified_base 97: mod_base = OTHER; note = Nucleotide with phosphorothioate linkage
  modified_base 98: mod_base = OTHER; note = 2'-O-methyl modified nucleotide with phosphorothioate linkage
  modified_base 99: mod_base = OTHER; note = 2'-O-methyl modified nucleotide with phosphorothioate linkage
  modified_base 100: mod_base = OTHER; note = 2'-O-methyl modified nucleotide

SEQ ID NO: 271 - RNA, 100 nt, synthetic construct; identical to SEQ ID NO: 166
  source 1..100: mol_type = other RNA
  modified_base 1: mod_base = OTHER; note = 2'-O-methyl modified nucleotide with phosphorothioate linkage
  modified_base 2: mod_base = OTHER; note = 2'-O-methyl modified nucleotide with phosphorothioate linkage
  modified_base 3: mod_base = OTHER; note = 2'-O-methyl modified nucleotide with phosphorothioate linkage
  modified_base 21: mod_base = OTHER; note = 2'-O-methyl modified nucleotide
  modified_base 28: mod_base = OTHER; note = 2'-O-methyl modified nucleotide
  modified_base 29: mod_base = OTHER; note = 2'-O-methyl modified nucleotide
  modified_base 30: mod_base = OTHER; note = 2'-O-methyl modified nucleotide
  modified_base 31: mod_base = OTHER; note = 2'-O-methyl modified nucleotide
  modified_base 32: mod_base = OTHER; note = 2'-O-methyl modified nucleotide
  modified_base 34: mod_base = OTHER; note = 2'-O-methyl modified nucleotide
  modified_base 35: mod_base = OTHER; note = 2'-O-methyl modified nucleotide
  modified_base 36: mod_base = OTHER; note = 2'-O-methyl modified nucleotide
  modified_base 37: mod_base = OTHER; note = 2'-O-methyl modified nucleotide
  modified_base 38: mod_base = OTHER; note = 2'-O-methyl modified nucleotide
  modified_base 39: mod_base = OTHER; note = 2'-O-methyl modified nucleotide
  modified_base 40: mod_base = OTHER; note = 2'-O-methyl modified nucleotide
  modified_base 41: mod_base = OTHER; note = 2'-O-methyl modified nucleotide
  modified_base 42: mod_base = OTHER; note = 2'-O-methyl modified nucleotide
  modified_base 46: mod_base = OTHER; note = 2'-O-methyl modified nucleotide
  modified_base 48: mod_base = OTHER; note = 2'-O-methyl modified nucleotide
  modified_base 50: mod_base = OTHER; note = 2'-O-methyl modified nucleotide
  modified_base 52: mod_base = OTHER; note = 2'-O-methyl modified nucleotide
  modified_base 53: mod_base = OTHER; note = 2'-O-methyl modified nucleotide
  modified_base 54: mod_base = OTHER; note = 2'-O-methyl modified nucleotide
  modified_base 55: mod_base = OTHER; note = 2'-O-methyl modified nucleotide
  modified_base 56: mod_base = OTHER; note = 2'-O-methyl modified nucleotide
  modified_base 57: mod_base = OTHER; note = 2'-O-methyl modified nucleotide
  modified_base 60: mod_base = OTHER; note = 2'-O-methyl modified nucleotide
  modified_base 61: mod_base = OTHER; note = 2'-O-methyl modified nucleotide
  modified_base 66: mod_base = OTHER; note = 2'-O-methyl modified nucleotide
  modified_base 67: mod_base = OTHER; note = 2'-O-methyl modified nucleotide
  modified_base 70: mod_base = OTHER; note = 2'-O-methyl modified nucleotide
  modified_base 71: mod_base = OTHER; note = 2'-O-methyl modified nucleotide
  modified_base 72: mod_base = OTHER; note = 2'-O-methyl modified nucleotide
  modified_base 74: mod_base = OTHER; note = 2'-O-methyl modified nucleotide
  modified_base 75: mod_base = OTHER; note = 2'-O-methyl modified nucleotide
  modified_base 76: mod_base = OTHER; note = 2'-O-methyl modified nucleotide
  modified_base 77: mod_base = OTHER; note = 2'-O-methyl modified nucleotide
  modified_base 78: mod_base = OTHER; note = 2'-O-methyl modified nucleotide
  modified_base 79: mod_base = OTHER; note = 2'-O-methyl modified nucleotide
  modified_base 80: mod_base = OTHER; note = 2'-O-methyl modified nucleotide
  modified_base 81: mod_base = OTHER; note = 2'-O-methyl modified nucleotide
  modified_base 83: mod_base = OTHER; note = 2'-O-methyl modified nucleotide
  modified_base 84: mod_base = OTHER; note = 2'-O-methyl modified nucleotide
  modified_base 85: mod_base = OTHER; note = 2'-O-methyl modified nucleotide
  modified_base 86: mod_base = OTHER; note = 2'-O-methyl modified nucleotide
  modified_base 87: mod_base = OTHER; note = 2'-O-methyl modified nucleotide
  modified_base 88: mod_base = OTHER; note = 2'-O-methyl modified nucleotide
  modified_base 89: mod_base = OTHER; note = 2'-O-methyl modified nucleotide
  modified_base 90: mod_base = OTHER; note = 2'-O-methyl modified nucleotide
  modified_base 91: mod_base = OTHER; note = 2'-O-methyl modified nucleotide
  modified_base 92: mod_base = OTHER; note = 2'-O-methyl modified nucleotide
  modified_base 93: mod_base = OTHER; note = 2'-O-methyl modified nucleotide
  modified_base 94: mod_base = OTHER; note = 2'-O-methyl modified nucleotide
  modified_base 95: mod_base = OTHER; note = 2'-O-methyl modified nucleotide
  modified_base 96: mod_base = OTHER; note = 2'-O-methyl modified nucleotide
  modified_base 97: mod_base = OTHER; note = 2'-O-methyl modified nucleotide with phosphorothioate linkage
  modified_base 98: mod_base = OTHER; note = 2'-O-methyl modified nucleotide with phosphorothioate linkage
  modified_base 99: mod_base = OTHER; note = 2'-O-methyl modified nucleotide with phosphorothioate linkage
  modified_base 100: mod_base = OTHER; note = 2'-O-methyl modified nucleotide

SEQ ID NO: 272 - RNA, 100 nt, synthetic construct; identical to SEQ ID NO: 167
  source 1..100: mol_type = other RNA
  modified_base 1: mod_base = OTHER; note = 2'-O-methyl modified nucleotide with phosphorothioate linkage
  modified_base 2: mod_base = OTHER; note = 2'-O-methyl modified nucleotide with phosphorothioate linkage
  modified_base 3: mod_base = OTHER; note = 2'-O-methyl modified nucleotide with phosphorothioate linkage
  modified_base 97: mod_base = OTHER; note = Nucleotide with phosphorothioate linkage
  modified_base 98: mod_base = OTHER; note = 2'-O-methyl modified nucleotide with phosphorothioate linkage
  modified_base 99: mod_base = OTHER; note = 2'-O-methyl modified nucleotide with phosphorothioate linkage
  modified_base 100: mod_base = OTHER; note = 2'-O-methyl modified nucleotide

SEQ ID NO: 273 - RNA, 100 nt, synthetic construct; identical to SEQ ID NO: 167
  source 1..100: mol_type = other RNA
  modified_base 1: mod_base = OTHER; note = 2'-O-methyl modified nucleotide with phosphorothioate linkage
  modified_base 2: mod_base = OTHER; note = 2'-O-methyl modified nucleotide with phosphorothioate linkage
  modified_base 3: mod_base = OTHER; note = 2'-O-methyl modified nucleotide with phosphorothioate linkage
  modified_base 21: mod_base = OTHER; note = 2'-O-methyl modified nucleotide
  modified_base 28: mod_base = OTHER; note = 2'-O-methyl modified nucleotide
  modified_base 29: mod_base = OTHER; note = 2'-O-methyl modified nucleotide
  modified_base 30: mod_base = OTHER; note = 2'-O-methyl modified nucleotide
  modified_base 31: mod_base = OTHER; note = 2'-O-methyl modified nucleotide
  modified_base 32: mod_base = OTHER; note = 2'-O-methyl modified nucleotide
  modified_base 34: mod_base = OTHER; note = 2'-O-methyl modified nucleotide
  modified_base 35: mod_base = OTHER; note = 2'-O-methyl modified nucleotide
  modified_base 36: mod_base = OTHER; note = 2'-O-methyl modified nucleotide
  modified_base 37: mod_base = OTHER; note = 2'-O-methyl modified nucleotide
  modified_base 38: mod_base = OTHER; note = 2'-O-methyl modified nucleotide
  modified_base 39: mod_base = OTHER; note = 2'-O-methyl modified nucleotide
  modified_base 40: mod_base = OTHER; note = 2'-O-methyl modified nucleotide
  modified_base 41: mod_base = OTHER; note = 2'-O-methyl modified nucleotide
  modified_base 42: mod_base = OTHER; note = 2'-O-methyl modified nucleotide
  modified_base 46: mod_base = OTHER; note = 2'-O-methyl modified nucleotide
  modified_base 48: mod_base = OTHER; note = 2'-O-methyl modified nucleotide
  modified_base 50: mod_base = OTHER; note = 2'-O-methyl modified nucleotide
  modified_base 52: mod_base = OTHER; note = 2'-O-methyl modified nucleotide
  modified_base 53: mod_base = OTHER; note = 2'-O-methyl modified nucleotide
  modified_base 54: mod_base = OTHER; note = 2'-O-methyl modified nucleotide
  modified_base 55: mod_base = OTHER; note = 2'-O-methyl modified nucleotide
  modified_base 56: mod_base = OTHER; note = 2'-O-methyl modified nucleotide
  modified_base 57: mod_base = OTHER; note = 2'-O-methyl modified nucleotide
  modified_base 60: mod_base = OTHER; note = 2'-O-methyl modified nucleotide
  modified_base 61: mod_base = OTHER; note = 2'-O-methyl modified nucleotide
  modified_base 66: mod_base = OTHER; note = 2'-O-methyl modified nucleotide
  modified_base 67: mod_base = OTHER; note = 2'-O-methyl modified nucleotide
  modified_base 70: mod_base = OTHER; note = 2'-O-methyl modified nucleotide
  modified_base 71: mod_base = OTHER; note = 2'-O-methyl modified nucleotide
  modified_base 72: mod_base = OTHER; note = 2'-O-methyl modified nucleotide
  modified_base 74: mod_base = OTHER; note = 2'-O-methyl modified nucleotide
  modified_base 75: mod_base = OTHER; note = 2'-O-methyl modified nucleotide
  modified_base 76: mod_base = OTHER; note = 2'-O-methyl modified nucleotide
  modified_base 77: mod_base = OTHER; note = 2'-O-methyl modified nucleotide
  modified_base 78: mod_base = OTHER; note = 2'-O-methyl modified nucleotide
  modified_base 79: mod_base = OTHER; note = 2'-O-methyl modified nucleotide
  modified_base 80: mod_base = OTHER; note = 2'-O-methyl modified nucleotide
  modified_base 81: mod_base = OTHER; note = 2'-O-methyl modified nucleotide
  modified_base 83: mod_base = OTHER; note = 2'-O-methyl modified nucleotide
  modified_base 84: mod_base = OTHER; note = 2'-O-methyl modified nucleotide
  modified_base 85: mod_base = OTHER; note = 2'-O-methyl modified nucleotide
  modified_base 86: mod_base = OTHER; note = 2'-O-methyl modified nucleotide
  modified_base 87: mod_base = OTHER; note = 2'-O-methyl modified nucleotide
  modified_base 88: mod_base = OTHER; note = 2'-O-methyl modified nucleotide
  modified_base 89: mod_base = OTHER; note = 2'-O-methyl modified nucleotide
  modified_base 90: mod_base = OTHER; note = 2'-O-methyl modified nucleotide
  modified_base 91: mod_base = OTHER; note = 2'-O-methyl modified nucleotide
  modified_base 92: mod_base = OTHER; note = 2'-O-methyl modified nucleotide
  modified_base 93: mod_base = OTHER; note = 2'-O-methyl modified nucleotide
  modified_base 94: mod_base = OTHER; note = 2'-O-methyl modified nucleotide
  modified_base 95: mod_base = OTHER; note = 2'-O-methyl modified nucleotide
  modified_base 96: mod_base = OTHER; note = 2'-O-methyl modified nucleotide
  modified_base 97: mod_base = OTHER; note = 2'-O-methyl modified nucleotide with phosphorothioate linkage
  modified_base 98: mod_base = OTHER; note = 2'-O-methyl modified nucleotide with phosphorothioate linkage
  modified_base 99: mod_base = OTHER; note = 2'-O-methyl modified nucleotide with phosphorothioate linkage
  modified_base 100: mod_base = OTHER; note = 2'-O-methyl modified nucleotide

SEQ ID NO: 274 - RNA, 100 nt, synthetic construct; identical to SEQ ID NO: 168
  source 1..100: mol_type = other RNA
  modified_base 1: mod_base = OTHER; note = 2'-O-methyl modified nucleotide with phosphorothioate linkage
  modified_base 2: mod_base = OTHER; note = 2'-O-methyl modified nucleotide with phosphorothioate linkage
  modified_base 3: mod_base = OTHER; note = 2'-O-methyl modified nucleotide with phosphorothioate linkage
  modified_base 97: mod_base = OTHER; note = Nucleotide with phosphorothioate linkage
  modified_base 98: mod_base = OTHER; note = 2'-O-methyl modified nucleotide with phosphorothioate linkage
  modified_base 99: mod_base = OTHER; note = 2'-O-methyl modified nucleotide with phosphorothioate linkage
  modified_base 100: mod_base = OTHER; note = 2'-O-methyl modified nucleotide

SEQ ID NO: 275 - RNA, 100 nt, synthetic construct; identical to SEQ ID NO: 169
  source 1..100: mol_type = other RNA
  modified_base 1: mod_base = OTHER; note = 2'-O-methyl modified nucleotide with phosphorothioate linkage
  modified_base 2: mod_base = OTHER; note = 2'-O-methyl modified nucleotide with phosphorothioate linkage
  modified_base 3: mod_base = OTHER; note = 2'-O-methyl modified nucleotide with phosphorothioate linkage
  modified_base 97: mod_base = OTHER; note = Nucleotide with phosphorothioate linkage
  modified_base 98: mod_base = OTHER; note = 2'-O-methyl modified nucleotide with phosphorothioate linkage
  modified_base 99: mod_base = OTHER; note = 2'-O-methyl modified nucleotide with phosphorothioate linkage
  modified_base 100: mod_base = OTHER; note = 2'-O-methyl modified nucleotide

SEQ ID NO: 276 - RNA, 100 nt, synthetic construct; identical to SEQ ID NO: 170
  source 1..100: mol_type = other RNA
  modified_base 1: mod_base = OTHER; note = 2'-O-methyl modified nucleotide with phosphorothioate linkage
  modified_base 2: mod_base = OTHER; note = 2'-O-methyl modified nucleotide with phosphorothioate linkage
  modified_base 3: mod_base = OTHER; note = 2'-O-methyl modified nucleotide with phosphorothioate linkage
  modified_base 97: mod_base = OTHER; note = Nucleotide with phosphorothioate linkage
  modified_base 98: mod_base = OTHER; note = 2'-O-methyl modified nucleotide with phosphorothioate linkage
  modified_base 99: mod_base = OTHER; note = 2'-O-methyl modified nucleotide with phosphorothioate linkage
  modified_base 100: mod_base = OTHER; note = 2'-O-methyl modified nucleotide

SEQ ID NO: 277 - RNA, 100 nt, synthetic construct; identical to SEQ ID NO: 170
  source 1..100: mol_type = other RNA
  modified_base 1: mod_base = OTHER; note = 2'-O-methyl modified nucleotide with phosphorothioate linkage
  modified_base 2: mod_base = OTHER; note = 2'-O-methyl modified nucleotide with phosphorothioate linkage
  modified_base 3: mod_base = OTHER; note = 2'-O-methyl modified nucleotide with phosphorothioate linkage
  modified_base 21: mod_base = OTHER; note = 2'-O-methyl modified nucleotide
  modified_base 28: mod_base = OTHER; note = 2'-O-methyl modified nucleotide
  modified_base 29: mod_base = OTHER; note = 2'-O-methyl modified nucleotide
  modified_base 30: mod_base = OTHER; note = 2'-O-methyl modified nucleotide
  modified_base 31: mod_base = OTHER; note = 2'-O-methyl modified nucleotide
  modified_base 32: mod_base = OTHER; note = 2'-O-methyl modified nucleotide
  modified_base 34: mod_base = OTHER; note = 2'-O-methyl modified nucleotide
  modified_base 35: mod_base = OTHER; note = 2'-O-methyl modified nucleotide
  modified_base 36: mod_base = OTHER; note = 2'-O-methyl modified nucleotide
  modified_base 37: mod_base = OTHER; note = 2'-O-methyl modified nucleotide
  modified_base 38: mod_base = OTHER; note = 2'-O-methyl modified nucleotide
  modified_base 39: mod_base = OTHER; note = 2'-O-methyl modified nucleotide
  modified_base 40: mod_base = OTHER; note = 2'-O-methyl modified nucleotide
  modified_base 41: mod_base = OTHER; note = 2'-O-methyl modified nucleotide
  modified_base 42: mod_base = OTHER; note = 2'-O-methyl modified nucleotide
  modified_base 46: mod_base = OTHER; note = 2'-O-methyl modified nucleotide
  modified_base 48: mod_base = OTHER; note = 2'-O-methyl modified nucleotide
  modified_base 50: mod_base = OTHER; note = 2'-O-methyl modified nucleotide
  modified_base 52: mod_base = OTHER; note = 2'-O-methyl modified nucleotide
  modified_base 53: mod_base = OTHER; note = 2'-O-methyl modified nucleotide
  modified_base 54: mod_base = OTHER; note = 2'-O-methyl modified nucleotide
  modified_base 55: mod_base = OTHER; note = 2'-O-methyl modified nucleotide
  modified_base 56: mod_base = OTHER; note = 2'-O-methyl modified nucleotide
  modified_base 57: mod_base = OTHER; note = 2'-O-methyl modified nucleotide
  modified_base 60: mod_base = OTHER; note = 2'-O-methyl modified nucleotide
  modified_base 61: mod_base = OTHER; note = 2'-O-methyl modified nucleotide
  modified_base 66: mod_base = OTHER; note = 2'-O-methyl modified nucleotide
  modified_base 67: mod_base = OTHER; note = 2'-O-methyl modified nucleotide
  modified_base 70: mod_base = OTHER; note = 2'-O-methyl modified nucleotide
  modified_base 71: mod_base = OTHER; note = 2'-O-methyl modified nucleotide
  modified_base 72: mod_base = OTHER; note = 2'-O-methyl modified nucleotide
  modified_base 74: mod_base = OTHER; note = 2'-O-methyl modified nucleotide
  modified_base 75: mod_base = OTHER; note = 2'-O-methyl modified nucleotide
  modified_base 76: mod_base = OTHER; note = 2'-O-methyl modified nucleotide
  modified_base 77: mod_base = OTHER; note = 2'-O-methyl modified nucleotide
  modified_base 78: mod_base = OTHER; note = 2'-O-methyl modified nucleotide
  modified_base 79: mod_base = OTHER; note = 2'-O-methyl modified nucleotide
  modified_base 80: mod_base = OTHER; note = 2'-O-methyl modified nucleotide
  modified_base 81: mod_base = OTHER; note = 2'-O-methyl modified nucleotide
  modified_base 83: mod_base = OTHER; note = 2'-O-methyl modified nucleotide
  modified_base 84: mod_base = OTHER; note = 2'-O-methyl modified nucleotide
  modified_base 85: mod_base = OTHER; note = 2'-O-methyl modified nucleotide
  modified_base 86: mod_base = OTHER; note = 2'-O-methyl modified nucleotide
  modified_base 87: mod_base = OTHER; note = 2'-O-methyl modified nucleotide
  modified_base 88: mod_base = OTHER; note = 2'-O-methyl modified nucleotide
  modified_base 89: mod_base = OTHER; note = 2'-O-methyl modified nucleotide
  modified_base 90: mod_base = OTHER; note = 2'-O-methyl modified nucleotide
  modified_base 91: mod_base = OTHER; note = 2'-O-methyl modified nucleotide
  modified_base 92: mod_base = OTHER; note = 2'-O-methyl modified nucleotide
  modified_base 93: mod_base = OTHER; note = 2'-O-methyl modified nucleotide
  modified_base 94: mod_base = OTHER; note = 2'-O-methyl modified nucleotide
  modified_base 95: mod_base = OTHER; note = 2'-O-methyl modified nucleotide
  modified_base 96: mod_base = OTHER; note = 2'-O-methyl modified nucleotide
  modified_base 97: mod_base = OTHER; note = 2'-O-methyl modified nucleotide with phosphorothioate linkage
  modified_base 98: mod_base = OTHER; note = 2'-O-methyl modified nucleotide with phosphorothioate linkage
  modified_base 99: mod_base = OTHER; note = 2'-O-methyl modified nucleotide with phosphorothioate linkage
  modified_base 100: mod_base = OTHER; note = 2'-O-methyl modified nucleotide

SEQ ID NO: 278 - RNA, 100 nt, synthetic construct; identical to SEQ ID NO: 171
  source 1..100: mol_type = other RNA
  modified_base 1: mod_base = OTHER; note = 2'-O-methyl modified nucleotide with phosphorothioate linkage
  modified_base 2: mod_base = OTHER; note = 2'-O-methyl modified nucleotide with phosphorothioate linkage
  modified_base 3: mod_base = OTHER; note = 2'-O-methyl modified nucleotide with phosphorothioate linkage
  modified_base 97: mod_base = OTHER; note = Nucleotide with phosphorothioate linkage
  modified_base 98: mod_base = OTHER; note = 2'-O-methyl modified nucleotide with phosphorothioate linkage
  modified_base 99: mod_base = OTHER; note = 2'-O-methyl modified nucleotide with phosphorothioate linkage
  modified_base 100: mod_base = OTHER; note = 2'-O-methyl modified nucleotide

SEQ ID NO: 279 - RNA, 100 nt, synthetic construct; identical to SEQ ID NO: 172
  source 1..100: mol_type = other RNA
  modified_base 1: mod_base = OTHER; note = 2'-O-methyl modified nucleotide with phosphorothioate linkage
  modified_base 2: mod_base = OTHER; note = 2'-O-methyl modified nucleotide with phosphorothioate linkage
  modified_base 3: mod_base = OTHER; note = 2'-O-methyl modified nucleotide with phosphorothioate linkage
  modified_base 97: mod_base = OTHER; note = Nucleotide with phosphorothioate linkage
  modified_base 98: mod_base = OTHER; note = 2'-O-methyl modified nucleotide with phosphorothioate linkage
  modified_base 99: mod_base = OTHER; note = 2'-O-methyl modified nucleotide with phosphorothioate linkage
  modified_base 100: mod_base = OTHER; note = 2'-O-methyl modified nucleotide

SEQ ID NO: 280 - RNA, 100 nt, synthetic construct; identical to SEQ ID NO: 172
  source 1..100: mol_type = other RNA
  modified_base 1: mod_base = OTHER; note = 2'-O-methyl modified nucleotide with phosphorothioate linkage
  modified_base 2: mod_base = OTHER; note = 2'-O-methyl modified nucleotide with phosphorothioate linkage
  modified_base 3: mod_base = OTHER; note = 2'-O-methyl modified nucleotide with phosphorothioate linkage
  modified_base 21: mod_base = OTHER; note = 2'-O-methyl modified nucleotide
  modified_base 28: mod_base = OTHER; note = 2'-O-methyl modified nucleotide
  modified_base 29: mod_base = OTHER; note = 2'-O-methyl modified nucleotide
  modified_base 30: mod_base = OTHER; note = 2'-O-methyl modified nucleotide
  modified_base 31: mod_base = OTHER; note = 2'-O-methyl modified nucleotide
  modified_base 32: mod_base = OTHER; note = 2'-O-methyl modified nucleotide
  modified_base 34: mod_base = OTHER; note = 2'-O-methyl modified nucleotide
  modified_base 35: mod_base = OTHER; note = 2'-O-methyl modified nucleotide
  modified_base 36: mod_base = OTHER; note = 2'-O-methyl modified nucleotide
  modified_base 37: mod_base = OTHER; note = 2'-O-methyl modified nucleotide
  modified_base 38: mod_base = OTHER; note = 2'-O-methyl modified nucleotide
  modified_base 39: mod_base = OTHER; note = 2'-O-methyl modified nucleotide
  modified_base 40: mod_base = OTHER; note = 2'-O-methyl modified nucleotide
  modified_base 41: mod_base = OTHER; note = 2'-O-methyl modified nucleotide
  modified_base 42: mod_base = OTHER; note = 2'-O-methyl modified nucleotide
  modified_base 46: mod_base = OTHER; note = 2'-O-methyl modified nucleotide
  modified_base 48: mod_base = OTHER; note = 2'-O-methyl modified nucleotide
  modified_base 50: mod_base = OTHER; note = 2'-O-methyl modified nucleotide
  modified_base 52: mod_base = OTHER; note = 2'-O-methyl modified nucleotide
  modified_base 53: mod_base = OTHER; note = 2'-O-methyl modified nucleotide
  modified_base 54: mod_base = OTHER; note = 2'-O-methyl modified nucleotide
  modified_base 55: mod_base = OTHER; note = 2'-O-methyl modified nucleotide
  modified_base 56: mod_base = OTHER; note = 2'-O-methyl modified nucleotide
  modified_base 57: mod_base = OTHER; note = 2'-O-methyl modified nucleotide
  modified_base 60: mod_base = OTHER; note = 2'-O-methyl modified nucleotide
  modified_base 61: mod_base = OTHER; note = 2'-O-methyl modified nucleotide
  modified_base 66: mod_base = OTHER; note = 2'-O-methyl modified nucleotide
  modified_base 67: mod_base = OTHER; note = 2'-O-methyl modified nucleotide
  modified_base 70: mod_base = OTHER; note = 2'-O-methyl modified nucleotide
  modified_base 71: mod_base = OTHER; note = 2'-O-methyl modified nucleotide
  modified_base 72: mod_base = OTHER; note = 2'-O-methyl modified nucleotide
  modified_base 74: mod_base = OTHER; note = 2'-O-methyl modified nucleotide
  modified_base 75: mod_base = OTHER; note = 2'-O-methyl modified nucleotide
  modified_base 76: mod_base = OTHER; note = 2'-O-methyl modified nucleotide
  modified_base 77: mod_base = OTHER; note = 2'-O-methyl modified nucleotide
  modified_base 78: mod_base = OTHER; note = 2'-O-methyl modified nucleotide
  modified_base 79: mod_base = OTHER; note = 2'-O-methyl modified nucleotide
  modified_base 80: mod_base = OTHER; note = 2'-O-methyl modified nucleotide
  modified_base 81: mod_base = OTHER; note = 2'-O-methyl modified nucleotide
  modified_base 83: mod_base = OTHER; note = 2'-O-methyl modified nucleotide
  modified_base 84: mod_base = OTHER; note = 2'-O-methyl modified nucleotide
  modified_base 85: mod_base = OTHER; note = 2'-O-methyl modified nucleotide
  modified_base 86: mod_base = OTHER; note = 2'-O-methyl modified nucleotide
  modified_base 87: mod_base = OTHER; note = 2'-O-methyl modified nucleotide
  modified_base 88: mod_base = OTHER; note = 2'-O-methyl modified nucleotide
  modified_base 89: mod_base = OTHER; note = 2'-O-methyl modified nucleotide
  modified_base 90: mod_base = OTHER; note = 2'-O-methyl modified nucleotide
  modified_base 91: mod_base = OTHER; note = 2'-O-methyl modified nucleotide
  modified_base 92: mod_base = OTHER; note = 2'-O-methyl modified nucleotide
  modified_base 93: mod_base = OTHER; note = 2'-O-methyl modified nucleotide
  modified_base 94: mod_base = OTHER; note = 2'-O-methyl modified nucleotide
  modified_base 95: mod_base = OTHER; note = 2'-O-methyl modified nucleotide
  modified_base 96: mod_base = OTHER; note = 2'-O-methyl modified nucleotide
  modified_base 97: mod_base = OTHER; note = 2'-O-methyl modified nucleotide with phosphorothioate linkage
  modified_base 98: mod_base = OTHER; note = 2'-O-methyl modified nucleotide with phosphorothioate linkage
  modified_base 99: mod_base = OTHER; note = 2'-O-methyl modified nucleotide with phosphorothioate linkage
  modified_base 100: mod_base = OTHER; note = 2'-O-methyl modified nucleotide

SEQ ID NO: 281 - RNA, 100 nt, synthetic construct; identical to SEQ ID NO: 173
  source 1..100: mol_type = other RNA
  modified_base 1: mod_base = OTHER; note = 2'-O-methyl modified nucleotide with phosphorothioate linkage
  modified_base 2: mod_base = OTHER; note = 2'-O-methyl modified nucleotide with phosphorothioate linkage
  modified_base 3: mod_base = OTHER; note = 2'-O-methyl modified nucleotide with phosphorothioate linkage
  modified_base 97: mod_base = OTHER; note = Nucleotide with phosphorothioate linkage
  modified_base 98: mod_base = OTHER; note = 2'-O-methyl modified nucleotide with phosphorothioate linkage
  modified_base 99: mod_base = OTHER; note = 2'-O-methyl modified nucleotide with phosphorothioate linkage
  modified_base 100: mod_base = OTHER; note = 2'-O-methyl modified nucleotide

SEQ ID NO: 282 - RNA, 100 nt, synthetic construct; identical to SEQ ID NO: 174
  source 1..100: mol_type = other RNA
  modified_base 1: mod_base = OTHER; note = 2'-O-methyl modified nucleotide with phosphorothioate linkage
  modified_base 2: mod_base = OTHER; note = 2'-O-methyl modified nucleotide with phosphorothioate linkage
  modified_base 3: mod_base = OTHER; note = 2'-O-methyl modified nucleotide with phosphorothioate linkage
  modified_base 97: mod_base = OTHER; note = Nucleotide with phosphorothioate linkage
  modified_base 98: mod_base = OTHER; note = 2'-O-methyl modified nucleotide with phosphorothioate linkage
  modified_base 99: mod_base = OTHER; note = 2'-O-methyl modified nucleotide with phosphorothioate linkage
  modified_base 100: mod_base = OTHER; note = 2'-O-methyl modified nucleotide

SEQ ID NO: 283 - RNA, 100 nt, synthetic construct; identical to SEQ ID NO: 175
  source 1..100: mol_type = other RNA
  modified_base 1: mod_base = OTHER; note = 2'-O-methyl modified nucleotide with phosphorothioate linkage
  modified_base 2: mod_base = OTHER; note = 2'-O-methyl modified nucleotide with phosphorothioate linkage
  modified_base 3: mod_base = OTHER; note = 2'-O-methyl modified nucleotide with phosphorothioate linkage
  modified_base 97: mod_base = OTHER; note = Nucleotide with phosphorothioate linkage
  modified_base 98: mod_base = OTHER; note = 2'-O-methyl modified nucleotide with phosphorothioate linkage
  modified_base 99: mod_base = OTHER; note = 2'-O-methyl modified nucleotide with phosphorothioate linkage
  modified_base 100: mod_base = OTHER; note = 2'-O-methyl modified nucleotide

SEQ ID NO: 284 - RNA, 100 nt, synthetic construct; identical to SEQ ID NO: 176
  source 1..100: mol_type = other RNA
  modified_base 1: mod_base = OTHER; note = 2'-O-methyl modified nucleotide with phosphorothioate linkage
  modified_base 2: mod_base = OTHER; note = 2'-O-methyl modified nucleotide with phosphorothioate linkage
  modified_base 3: mod_base = OTHER; note = 2'-O-methyl modified nucleotide with phosphorothioate linkage
  modified_base 97: mod_base = OTHER; note = Nucleotide with phosphorothioate linkage
  modified_base 98: mod_base = OTHER; note = 2'-O-methyl modified nucleotide with phosphorothioate linkage
  modified_base 99: mod_base = OTHER; note = 2'-O-methyl modified nucleotide with phosphorothioate linkage
  modified_base 100: mod_base = OTHER; note = 2'-O-methyl modified nucleotide

SEQ ID NO: 285 - RNA, 100 nt, synthetic construct; identical to SEQ ID NO: 176
  source 1..100: mol_type = other RNA
  modified_base 1: mod_base = OTHER; note = 2'-O-methyl modified nucleotide with phosphorothioate linkage
  modified_base 2: mod_base = OTHER; note = 2'-O-methyl modified nucleotide with phosphorothioate linkage
  modified_base 3: mod_base = OTHER; note = 2'-O-methyl modified nucleotide with phosphorothioate linkage
  modified_base 21: mod_base = OTHER; note = 2'-O-methyl modified nucleotide
  modified_base 28: mod_base = OTHER; note = 2'-O-methyl modified nucleotide
  modified_base 29: mod_base = OTHER; note = 2'-O-methyl modified nucleotide
  modified_base 30: mod_base = OTHER; note = 2'-O-methyl modified nucleotide
  modified_base 31: mod_base = OTHER; note = 2'-O-methyl modified nucleotide
  modified_base 32: mod_base = OTHER; note = 2'-O-methyl modified nucleotide
  modified_base 34: mod_base = OTHER; note = 2'-O-methyl modified nucleotide
  modified_base 35: mod_base = OTHER; note = 2'-O-methyl modified nucleotide
  modified_base 36: mod_base = OTHER; note = 2'-O-methyl modified nucleotide
  modified_base 37: mod_base = OTHER; note = 2'-O-methyl modified nucleotide
  modified_base 38: mod_base = OTHER; note = 2'-O-methyl modified nucleotide
  modified_base 39: mod_base = OTHER; note = 2'-O-methyl modified nucleotide
  modified_base 40: mod_base = OTHER; note = 2'-O-methyl modified nucleotide
  modified_base 41: mod_base = OTHER; note = 2'-O-methyl modified nucleotide
  modified_base 42: mod_base = OTHER; note = 2'-O-methyl modified nucleotide
  modified_base 46: mod_base = OTHER; note = 2'-O-methyl modified nucleotide
  modified_base 48: mod_base = OTHER; note = 2'-O-methyl modified nucleotide
  modified_base 50: mod_base = OTHER; note = 2'-O-methyl modified nucleotide
  modified_base 52: mod_base = OTHER; note = 2'-O-methyl modified nucleotide
  modified_base 53: mod_base = OTHER; note = 2'-O-methyl modified nucleotide
  modified_base 54: mod_base = OTHER; note = 2'-O-methyl modified nucleotide
  modified_base 55: mod_base = OTHER; note = 2'-O-methyl modified nucleotide
  modified_base 56: mod_base = OTHER; note = 2'-O-methyl modified nucleotide
  modified_base 57: mod_base = OTHER; note = 2'-O-methyl modified nucleotide
  modified_base 60: mod_base = OTHER; note = 2'-O-methyl modified nucleotide
  modified_base 61: mod_base = OTHER; note = 2'-O-methyl modified nucleotide
  modified_base 66: mod_base = OTHER; note = 2'-O-methyl modified nucleotide
  modified_base 67: mod_base = OTHER; note = 2'-O-methyl modified nucleotide
  modified_base 70: mod_base = OTHER; note = 2'-O-methyl modified nucleotide
  modified_base 71: mod_base = OTHER; note = 2'-O-methyl modified nucleotide
  modified_base 72: mod_base = OTHER; note = 2'-O-methyl modified nucleotide
  modified_base 74: mod_base = OTHER; note = 2'-O-methyl modified nucleotide
  modified_base 75: mod_base = OTHER; note = 2'-O-methyl modified nucleotide
  modified_base 76: mod_base = OTHER; note = 2'-O-methyl modified nucleotide
  modified_base 77: mod_base = OTHER; note = 2'-O-methyl modified nucleotide
  modified_base 78: mod_base = OTHER; note = 2'-O-methyl modified nucleotide
  modified_base 79: mod_base = OTHER; note = 2'-O-methyl modified nucleotide
  modified_base 80: mod_base = OTHER; note = 2'-O-methyl modified nucleotide
  modified_base 81: mod_base = OTHER; note = 2'-O-methyl modified nucleotide
  modified_base 83: mod_base = OTHER; note = 2'-O-methyl modified nucleotide
  modified_base 84: mod_base = OTHER; note = 2'-O-methyl modified nucleotide
  modified_base 85: mod_base = OTHER; note = 2'-O-methyl modified nucleotide
  modified_base 86: mod_base = OTHER; note = 2'-O-methyl modified nucleotide
  modified_base 87: mod_base = OTHER; note = 2'-O-methyl modified nucleotide
  modified_base 88: mod_base = OTHER; note = 2'-O-methyl modified nucleotide
  modified_base 89: mod_base = OTHER; note = 2'-O-methyl modified nucleotide
  modified_base 90: mod_base = OTHER; note = 2'-O-methyl modified nucleotide
  modified_base 91: mod_base = OTHER; note = 2'-O-methyl modified nucleotide
  modified_base 92: mod_base = OTHER; note = 2'-O-methyl modified nucleotide
  modified_base 93: mod_base = OTHER; note = 2'-O-methyl modified nucleotide
  modified_base 94: mod_base = OTHER; note = 2'-O-methyl modified nucleotide
  modified_base 95: mod_base = OTHER; note = 2'-O-methyl modified nucleotide
  modified_base 96: mod_base = OTHER; note = 2'-O-methyl modified nucleotide
  modified_base 97: mod_base = OTHER; note = 2'-O-methyl modified nucleotide with phosphorothioate linkage
  modified_base 98: mod_base = OTHER; note = 2'-O-methyl modified nucleotide with phosphorothioate linkage
  modified_base 99: mod_base = OTHER; note = 2'-O-methyl modified nucleotide with phosphorothioate linkage
  modified_base 100: mod_base = OTHER; note = 2'-O-methyl modified nucleotide

SEQ ID NO: 286 - RNA, 100 nt, synthetic construct; identical to SEQ ID NO: 177
  source 1..100: mol_type = other RNA
  modified_base 1: mod_base = OTHER; note = 2'-O-methyl modified nucleotide with phosphorothioate linkage
  modified_base 2: mod_base = OTHER; note = 2'-O-methyl modified nucleotide with phosphorothioate linkage
  modified_base 3: mod_base = OTHER; note = 2'-O-methyl modified nucleotide with phosphorothioate linkage
  modified_base 97: mod_base = OTHER; note = Nucleotide with phosphorothioate linkage
  modified_base 98: mod_base = OTHER; note = 2'-O-methyl modified nucleotide with phosphorothioate linkage
  modified_base 99: mod_base = OTHER; note = 2'-O-methyl modified nucleotide with phosphorothioate linkage
  modified_base 100: mod_base = OTHER; note = 2'-O-methyl modified nucleotide

SEQ ID NO: 287 - RNA, 100 nt, synthetic construct; identical to SEQ ID NO: 177
  source 1..100: mol_type = other RNA
  modified_base 1: mod_base = OTHER; note = 2'-O-methyl modified nucleotide with phosphorothioate linkage
  modified_base 2: mod_base = OTHER; note = 2'-O-methyl modified nucleotide with phosphorothioate linkage
  modified_base 3: mod_base = OTHER; note = 2'-O-methyl modified nucleotide with phosphorothioate linkage
  modified_base 21: mod_base = OTHER; note = 2'-O-methyl modified nucleotide
  modified_base 28: mod_base = OTHER; note = 2'-O-methyl modified nucleotide
  modified_base 29: mod_base = OTHER; note = 2'-O-methyl modified nucleotide
  modified_base 30: mod_base = OTHER; note = 2'-O-methyl modified nucleotide
  modified_base 31: mod_base = OTHER; note = 2'-O-methyl modified nucleotide
  modified_base 32: mod_base = OTHER; note = 2'-O-methyl modified nucleotide
  modified_base 34: mod_base = OTHER; note = 2'-O-methyl modified nucleotide
  modified_base 35: mod_base = OTHER; note = 2'-O-methyl modified nucleotide
  modified_base 36: mod_base = OTHER; note = 2'-O-methyl modified nucleotide
  modified_base 37: mod_base = OTHER; note = 2'-O-methyl modified nucleotide
  modified_base 38: mod_base = OTHER; note = 2'-O-methyl modified nucleotide
  modified_base 39: mod_base = OTHER; note = 2'-O-methyl modified nucleotide
  modified_base 40: mod_base = OTHER; note = 2'-O-methyl modified nucleotide
  modified_base 41: mod_base = OTHER; note = 2'-O-methyl modified nucleotide
  modified_base 42: mod_base = OTHER; note = 2'-O-methyl modified nucleotide
  modified_base 46: mod_base = OTHER; note = 2'-O-methyl modified nucleotide
  modified_base 48: mod_base = OTHER; note = 2'-O-methyl modified nucleotide
  modified_base 50: mod_base = OTHER; note = 2'-O-methyl modified nucleotide
  modified_base 52: mod_base = OTHER; note = 2'-O-methyl modified nucleotide
  modified_base 53: mod_base = OTHER; note = 2'-O-methyl modified nucleotide
  modified_base 54: mod_base = OTHER; note = 2'-O-methyl modified nucleotide
  modified_base 55: mod_base = OTHER; note = 2'-O-methyl modified nucleotide
  modified_base 56: mod_base = OTHER; note = 2'-O-methyl modified nucleotide
  modified_base 57: mod_base = OTHER; note = 2'-O-methyl modified nucleotide
  modified_base 60: mod_base = OTHER; note = 2'-O-methyl modified nucleotide
  modified_base 61: mod_base = OTHER; note = 2'-O-methyl modified nucleotide
  modified_base 66: mod_base = OTHER; note = 2'-O-methyl modified nucleotide
  modified_base 67: mod_base = OTHER; note = 2'-O-methyl modified nucleotide
  modified_base 70: mod_base = OTHER; note = 2'-O-methyl modified nucleotide
  modified_base 71: mod_base = OTHER; note = 2'-O-methyl modified nucleotide
  modified_base 72: mod_base = OTHER; note = 2'-O-methyl modified nucleotide
  modified_base 74: mod_base = OTHER; note = 2'-O-methyl modified nucleotide
  modified_base 75: mod_base = OTHER; note = 2'-O-methyl modified nucleotide
  modified_base 76: mod_base = OTHER; note = 2'-O-methyl modified nucleotide
  modified_base 77: mod_base = OTHER; note = 2'-O-methyl modified nucleotide
  modified_base 78: mod_base = OTHER; note = 2'-O-methyl modified nucleotide
  modified_base 79: mod_base = OTHER; note = 2'-O-methyl modified nucleotide
  modified_base 80: mod_base = OTHER; note = 2'-O-methyl modified nucleotide
  modified_base 81: mod_base = OTHER; note = 2'-O-methyl modified nucleotide
  modified_base 83: mod_base = OTHER; note = 2'-O-methyl modified nucleotide
  modified_base 84: mod_base = OTHER; note = 2'-O-methyl modified nucleotide
  modified_base 85: mod_base = OTHER; note = 2'-O-methyl modified nucleotide
  modified_base 86: mod_base = OTHER; note = 2'-O-methyl modified nucleotide
  modified_base 87: mod_base = OTHER; note = 2'-O-methyl modified nucleotide
  modified_base 88: mod_base = OTHER; note = 2'-O-methyl modified nucleotide
  modified_base 89: mod_base = OTHER; note = 2'-O-methyl modified nucleotide
  modified_base 90: mod_base = OTHER; note = 2'-O-methyl modified nucleotide
  modified_base 91: mod_base = OTHER; note = 2'-O-methyl modified nucleotide
  modified_base 92: mod_base = OTHER; note = 2'-O-methyl modified nucleotide
  modified_base 93: mod_base = OTHER; note = 2'-O-methyl modified nucleotide
  modified_base 94: mod_base = OTHER; note = 2'-O-methyl modified nucleotide
  modified_base 95: mod_base = OTHER; note = 2'-O-methyl modified nucleotide
  modified_base 96: mod_base = OTHER; note = 2'-O-methyl modified nucleotide
  modified_base 97: mod_base = OTHER; note = 2'-O-methyl modified nucleotide with phosphorothioate linkage
  modified_base 98: mod_base = OTHER; note = 2'-O-methyl modified nucleotide with phosphorothioate linkage
  modified_base 99: mod_base = OTHER; note = 2'-O-methyl modified nucleotide with phosphorothioate linkage
  modified_base 100: mod_base = OTHER; note = 2'-O-methyl modified nucleotide

SEQ ID NO: 288 - RNA, 100 nt, synthetic construct; identical to SEQ ID NO: 178
  source 1..100: mol_type = other RNA
  modified_base 1: mod_base = OTHER; note = 2'-O-methyl modified nucleotide with phosphorothioate linkage
  modified_base 2: mod_base = OTHER; note = 2'-O-methyl modified nucleotide with phosphorothioate linkage
  modified_base 3: mod_base = OTHER; note = 2'-O-methyl modified nucleotide with phosphorothioate linkage
  modified_base 97: mod_base = OTHER; note = Nucleotide with phosphorothioate linkage
  modified_base 98: mod_base = OTHER; note = 2'-O-methyl modified nucleotide with phosphorothioate linkage
  modified_base 99: mod_base = OTHER; note = 2'-O-methyl modified nucleotide with phosphorothioate linkage
  modified_base 100: mod_base = OTHER; note = 2'-O-methyl modified nucleotide

SEQ ID NO: 289 - RNA, 100 nt, synthetic construct; identical to SEQ ID NO: 178
  source 1..100: mol_type = other RNA
  modified_base 1: mod_base = OTHER; note = 2'-O-methyl modified nucleotide with phosphorothioate linkage
  modified_base 2: mod_base = OTHER; note = 2'-O-methyl modified nucleotide with phosphorothioate linkage
  modified_base 3: mod_base = OTHER; note = 2'-O-methyl modified nucleotide with phosphorothioate linkage
  modified_base 21: mod_base = OTHER; note = 2'-O-methyl modified nucleotide
  modified_base 28: mod_base = OTHER; note = 2'-O-methyl modified nucleotide
  modified_base 29: mod_base = OTHER; note = 2'-O-methyl modified nucleotide
  modified_base 30: mod_base = OTHER; note = 2'-O-methyl modified nucleotide
  modified_base 31: mod_base = OTHER; note = 2'-O-methyl modified nucleotide
  modified_base 32: mod_base = OTHER; note = 2'-O-methyl modified nucleotide
  modified_base 34: mod_base = OTHER; note = 2'-O-methyl modified nucleotide
  modified_base 35: mod_base = OTHER; note = 2'-O-methyl modified nucleotide
  modified_base 36: mod_base = OTHER; note = 2'-O-methyl modified nucleotide
  modified_base 37: mod_base = OTHER; note = 2'-O-methyl modified nucleotide
  modified_base 38: mod_base = OTHER; note = 2'-O-methyl modified nucleotide
  modified_base 39: mod_base = OTHER; note = 2'-O-methyl modified nucleotide
  modified_base 40: mod_base = OTHER; note = 2'-O-methyl modified nucleotide
  modified_base 41: mod_base = OTHER; note = 2'-O-methyl modified nucleotide
  modified_base 42: mod_base = OTHER; note = 2'-O-methyl modified nucleotide
  modified_base 46: mod_base = OTHER; note = 2'-O-methyl modified nucleotide
  modified_base 48: mod_base = OTHER; note = 2'-O-methyl modified nucleotide
  modified_base 50: mod_base = OTHER; note = 2'-O-methyl modified nucleotide
  modified_base 52: mod_base = OTHER; note = 2'-O-methyl modified nucleotide
  modified_base 53: mod_base = OTHER; note = 2'-O-methyl modified nucleotide
  modified_base 54: mod_base = OTHER; note = 2'-O-methyl modified nucleotide
  modified_base 55: mod_base = OTHER; note = 2'-O-methyl modified nucleotide
  modified_base 56: mod_base = OTHER; note = 2'-O-methyl modified nucleotide
  modified_base 57: mod_base = OTHER; note = 2'-O-methyl modified nucleotide
  modified_base 60: mod_base = OTHER; note = 2'-O-methyl modified nucleotide
  modified_base 61: mod_base = OTHER; note = 2'-O-methyl modified nucleotide
  modified_base 66: mod_base = OTHER; note = 2'-O-methyl modified nucleotide
  modified_base 67: mod_base = OTHER; note = 2'-O-methyl modified nucleotide
  modified_base 70: mod_base = OTHER; note = 2'-O-methyl modified nucleotide
  modified_base 71: mod_base = OTHER; note = 2'-O-methyl modified nucleotide
  modified_base 72: mod_base = OTHER; note = 2'-O-methyl modified nucleotide
  modified_base 74: mod_base = OTHER; note = 2'-O-methyl modified nucleotide
  modified_base 75: mod_base = OTHER; note = 2'-O-methyl modified nucleotide
  modified_base 76: mod_base = OTHER; note = 2'-O-methyl modified nucleotide
  modified_base 77: mod_base = OTHER; note = 2'-O-methyl modified nucleotide
  modified_base 78: mod_base = OTHER; note = 2'-O-methyl modified nucleotide
  modified_base 79: mod_base = OTHER; note = 2'-O-methyl modified nucleotide
  modified_base 80: mod_base = OTHER; note = 2'-O-methyl modified nucleotide
  modified_base 81: mod_base = OTHER; note = 2'-O-methyl modified nucleotide
  modified_base 83: mod_base = OTHER; note = 2'-O-methyl modified nucleotide
  modified_base 84: mod_base = OTHER; note = 2'-O-methyl modified nucleotide
  modified_base 85: mod_base = OTHER; note = 2'-O-methyl modified nucleotide
  modified_base 86: mod_base = OTHER; note = 2'-O-methyl modified nucleotide
  modified_base 87: mod_base = OTHER; note = 2'-O-methyl modified nucleotide
  modified_base 88: mod_base = OTHER; note = 2'-O-methyl modified nucleotide
  modified_base 89: mod_base = OTHER; note = 2'-O-methyl modified nucleotide
  modified_base 90: mod_base = OTHER; note = 2'-O-methyl modified nucleotide
  modified_base 91: mod_base = OTHER; note = 2'-O-methyl modified nucleotide
  modified_base 92: mod_base = OTHER; note = 2'-O-methyl modified nucleotide
  modified_base 93: mod_base = OTHER; note = 2'-O-methyl modified nucleotide
  modified_base 94: mod_base = OTHER; note = 2'-O-methyl modified nucleotide
  modified_base 95: mod_base = OTHER; note = 2'-O-methyl modified nucleotide
  modified_base 96: mod_base = OTHER; note = 2'-O-methyl modified nucleotide
  modified_base 97: mod_base = OTHER; note = 2'-O-methyl modified nucleotide with phosphorothioate linkage
  modified_base 98: mod_base = OTHER; note = 2'-O-methyl modified nucleotide with phosphorothioate linkage
  modified_base 99: mod_base = OTHER; note = 2'-O-methyl modified nucleotide with phosphorothioate linkage
  modified_base 100: mod_base = OTHER; note = 2'-O-methyl modified nucleotide

SEQ ID NO: 290 - RNA, 100 nt, synthetic construct; identical to SEQ ID NO: 179
  source 1..100: mol_type = other RNA
  modified_base 1: mod_base = OTHER; note = 2'-O-methyl modified nucleotide with phosphorothioate linkage
  modified_base 2: mod_base = OTHER; note = 2'-O-methyl modified nucleotide with phosphorothioate linkage
  modified_base 3: mod_base = OTHER; note = 2'-O-methyl modified nucleotide with phosphorothioate linkage
  modified_base 97: mod_base = OTHER; note = Nucleotide with phosphorothioate linkage
  modified_base 98: mod_base = OTHER; note = 2'-O-methyl modified nucleotide with phosphorothioate linkage
  modified_base 99: mod_base = OTHER; note = 2'-O-methyl modified nucleotide with phosphorothioate linkage
  modified_base 100: mod_base = OTHER; note = 2'-O-methyl modified nucleotide

SEQ ID NO: 291 - RNA, 100 nt, synthetic construct; identical to SEQ ID NO: 180
  source 1..100: mol_type = other RNA
  modified_base 1: mod_base = OTHER; note = 2'-O-methyl modified nucleotide with phosphorothioate linkage
  modified_base 2: mod_base = OTHER; note = 2'-O-methyl modified nucleotide with phosphorothioate linkage
  modified_base 3: mod_base = OTHER; note = 2'-O-methyl modified nucleotide with phosphorothioate linkage
  modified_base 97: mod_base = OTHER; note = Nucleotide with phosphorothioate linkage
  modified_base 98: mod_base = OTHER; note = 2'-O-methyl modified nucleotide with phosphorothioate linkage
  modified_base 99: mod_base = OTHER; note = 2'-O-methyl modified nucleotide with phosphorothioate linkage
  modified_base 100: mod_base = OTHER; note = 2'-O-methyl modified nucleotide

SEQ ID NO: 292 - RNA, 100 nt, synthetic construct; identical to SEQ ID NO: 181
  source 1..100: mol_type = other RNA
  modified_base 1: mod_base = OTHER; note = 2'-O-methyl modified nucleotide with phosphorothioate linkage
  modified_base 2: mod_base = OTHER; note = 2'-O-methyl modified nucleotide with phosphorothioate linkage
  modified_base 3: mod_base = OTHER; note = 2'-O-methyl modified nucleotide with phosphorothioate linkage
  modified_base 97: mod_base = OTHER; note = Nucleotide with phosphorothioate linkage
  modified_base 98: mod_base = OTHER; note = 2'-O-methyl modified nucleotide with phosphorothioate linkage
  modified_base 99: mod_base = OTHER; note = 2'-O-methyl modified nucleotide with phosphorothioate linkage
  modified_base 100: mod_base = OTHER; note = 2'-O-methyl modified nucleotide

SEQ ID NO: 293 - RNA, 100 nt, synthetic construct; identical to SEQ ID NO: 182
  source 1..100: mol_type = other RNA
  modified_base 1: mod_base = OTHER; note = 2'-O-methyl modified nucleotide with phosphorothioate linkage
  modified_base 2: mod_base = OTHER; note = 2'-O-methyl modified nucleotide with phosphorothioate linkage
  modified_base 3: mod_base = OTHER; note = 2'-O-methyl modified nucleotide with phosphorothioate linkage
  modified_base 97: mod_base = OTHER; note = Nucleotide with phosphorothioate linkage
  modified_base 98: mod_base = OTHER; note = 2'-O-methyl modified nucleotide with phosphorothioate linkage
  modified_base 99: mod_base = OTHER; note = 2'-O-methyl modified nucleotide with phosphorothioate linkage
  modified_base 100: mod_base = OTHER; note = 2'-O-methyl modified nucleotide

SEQ ID NO: 294 - RNA, 100 nt, synthetic construct; identical to SEQ ID NO: 183
  source 1..100: mol_type = other RNA
  modified_base 1: mod_base = OTHER; note = 2'-O-methyl modified nucleotide with phosphorothioate linkage
  modified_base 2: mod_base = OTHER; note = 2'-O-methyl modified nucleotide with phosphorothioate linkage
  modified_base 3: mod_base = OTHER; note = 2'-O-methyl modified nucleotide with phosphorothioate linkage
  modified_base 97: mod_base = OTHER; note = Nucleotide with phosphorothioate linkage
  modified_base 98: mod_base = OTHER; note = 2'-O-methyl modified nucleotide with phosphorothioate linkage
  modified_base 99: mod_base = OTHER; note = 2'-O-methyl modified nucleotide with phosphorothioate linkage
  modified_base 100: mod_base = OTHER; note = 2'-O-methyl modified nucleotide

SEQ ID NO: 295 - RNA, 100 nt, synthetic construct; identical to SEQ ID NO: 184
  source 1..100: mol_type = other RNA
  modified_base 1: mod_base = OTHER; note = 2'-O-methyl modified nucleotide with phosphorothioate linkage
  modified_base 2: mod_base = OTHER; note = 2'-O-methyl modified nucleotide with phosphorothioate linkage
  modified_base 3: mod_base = OTHER; note = 2'-O-methyl modified nucleotide with phosphorothioate linkage
  modified_base 97: mod_base = OTHER; note = Nucleotide with phosphorothioate linkage
  modified_base 98: mod_base = OTHER; note = 2'-O-methyl modified nucleotide with phosphorothioate linkage
  modified_base 99: mod_base = OTHER; note = 2'-O-methyl modified nucleotide with phosphorothioate linkage
  modified_base 100: mod_base = OTHER; note = 2'-O-methyl modified nucleotide

SEQ ID NO: 296 - RNA, 100 nt, synthetic construct; identical to SEQ ID NO: 185
  source 1..100: mol_type = other RNA
  modified_base 1: mod_base = OTHER; note = 2'-O-methyl modified nucleotide with phosphorothioate linkage
  modified_base 2: mod_base = OTHER; note = 2'-O-methyl modified nucleotide with phosphorothioate linkage
  modified_base 3: mod_base = OTHER; note = 2'-O-methyl modified nucleotide with phosphorothioate linkage
  modified_base 97: mod_base = OTHER; note = Nucleotide with phosphorothioate linkage
  modified_base 98: mod_base = OTHER; note = 2'-O-methyl modified nucleotide with phosphorothioate linkage
  modified_base 99: mod_base = OTHER; note = 2'-O-methyl modified nucleotide with phosphorothioate linkage
  modified_base 100: mod_base = OTHER; note = 2'-O-methyl modified nucleotide

SEQ ID NO: 297 - RNA, 100 nt, synthetic construct; identical to SEQ ID NO: 186
  source 1..100: mol_type = other RNA
  modified_base 1: mod_base = OTHER; note = 2'-O-methyl modified nucleotide with phosphorothioate linkage
  modified_base 2: mod_base = OTHER; note = 2'-O-methyl modified nucleotide with phosphorothioate linkage
  modified_base 3: mod_base = OTHER; note = 2'-O-methyl modified nucleotide with phosphorothioate linkage
  modified_base 97: mod_base = OTHER; note = Nucleotide with phosphorothioate linkage
  modified_base 98: mod_base = OTHER; note = 2'-O-methyl modified nucleotide with phosphorothioate linkage
  modified_base 99: mod_base = OTHER; note = 2'-O-methyl modified nucleotide with phosphorothioate linkage
  modified_base 100: mod_base = OTHER; note = 2'-O-methyl modified nucleotide

SEQ ID NO: 298 - RNA, 100 nt, synthetic construct; identical to SEQ ID NO: 187
  source 1..100: mol_type = other RNA
  modified_base 1: mod_base = OTHER; note = 2'-O-methyl modified nucleotide with phosphorothioate linkage
  modified_base 2: mod_base = OTHER; note = 2'-O-methyl modified nucleotide with phosphorothioate linkage
  modified_base 3: mod_base = OTHER; note = 2'-O-methyl modified nucleotide with phosphorothioate linkage
  modified_base 97: mod_base = OTHER; note = Nucleotide with phosphorothioate linkage
  modified_base 98: mod_base = OTHER; note = 2'-O-methyl modified nucleotide with phosphorothioate linkage
  modified_base 99: mod_base = OTHER; note = 2'-O-methyl modified nucleotide with phosphorothioate linkage
  modified_base 100: mod_base = OTHER; note = 2'-O-methyl modified nucleotide

SEQ ID NO: 299 - RNA, 100 nt, synthetic construct; identical to SEQ ID NO: 188
  source 1..100: mol_type = other RNA
  modified_base 1: mod_base = OTHER; note = 2'-O-methyl modified nucleotide with phosphorothioate linkage
  modified_base 2: mod_base = OTHER; note = 2'-O-methyl modified nucleotide with phosphorothioate linkage
  modified_base 3: mod_base = OTHER; note = 2'-O-methyl modified nucleotide with phosphorothioate linkage
  modified_base 97: mod_base = OTHER; note = Nucleotide with phosphorothioate linkage
  modified_base 98: mod_base = OTHER; note = 2'-O-methyl modified nucleotide with phosphorothioate linkage
  modified_base 99: mod_base = OTHER; note = 2'-O-methyl modified nucleotide with phosphorothioate linkage
  modified_base 100: mod_base = OTHER; note = 2'-O-methyl modified nucleotide

SEQ ID NO: 300 - RNA, 100 nt, synthetic construct; identical to SEQ ID NO: 189
  source 1..100: mol_type = other RNA
  modified_base 1: mod_base = OTHER; note = 2'-O-methyl modified nucleotide with phosphorothioate linkage
  modified_base 2: mod_base = OTHER; note = 2'-O-methyl modified nucleotide with phosphorothioate linkage
  modified_base 3: mod_base = OTHER; note = 2'-O-methyl modified nucleotide with phosphorothioate linkage
  modified_base 97: mod_base = OTHER; note = Nucleotide with phosphorothioate linkage
  modified_base 98: mod_base = OTHER; note = 2'-O-methyl modified nucleotide with phosphorothioate linkage
  modified_base 99: mod_base = OTHER; note = 2'-O-methyl modified nucleotide with phosphorothioate linkage
  modified_base 100: mod_base = OTHER; note = 2'-O-methyl modified nucleotide

SEQ ID NO: 301 - RNA, 100 nt, synthetic construct; identical to SEQ ID NO: 190
  source 1..100: mol_type = other RNA
  modified_base 1: mod_base = OTHER; note = 2'-O-methyl modified nucleotide with phosphorothioate linkage
  modified_base 2: mod_base = OTHER; note = 2'-O-methyl modified nucleotide with phosphorothioate linkage
  modified_base 3: mod_base = OTHER; note = 2'-O-methyl modified nucleotide with phosphorothioate linkage
  modified_base 97: mod_base = OTHER; note = Nucleotide with phosphorothioate linkage
  modified_base 98: mod_base = OTHER; note = 2'-O-methyl modified nucleotide with phosphorothioate linkage
  modified_base 99: mod_base = OTHER; note = 2'-O-methyl modified nucleotide with phosphorothioate linkage
  modified_base 100: mod_base = OTHER; note = 2'-O-methyl modified nucleotide

SEQ ID NO: 302 - RNA, 100 nt, synthetic construct; identical to SEQ ID NO: 191
  source 1..100: mol_type = other RNA
  modified_base 1: mod_base = OTHER; note = 2'-O-methyl modified nucleotide with phosphorothioate linkage
  modified_base 2: mod_base = OTHER; note = 2'-O-methyl modified nucleotide with phosphorothioate linkage
  modified_base 3: mod_base = OTHER; note = 2'-O-methyl modified nucleotide with phosphorothioate linkage
  modified_base 97: mod_base = OTHER; note = Nucleotide with phosphorothioate linkage
  modified_base 98: mod_base = OTHER; note = 2'-O-methyl modified nucleotide with phosphorothioate linkage
  modified_base 99: mod_base = OTHER; note = 2'-O-methyl modified nucleotide with phosphorothioate linkage
  modified_base 100: mod_base = OTHER; note = 2'-O-methyl modified nucleotide

SEQ ID NO: 303 - RNA, 100 nt, synthetic construct; identical to SEQ ID NO: 192
  source 1..100: mol_type = other RNA
  modified_base 1: mod_base = OTHER; note = 2'-O-methyl modified nucleotide with phosphorothioate linkage
  modified_base 2: mod_base = OTHER; note = 2'-O-methyl modified nucleotide with phosphorothioate linkage
  modified_base 3: mod_base = OTHER; note = 2'-O-methyl modified nucleotide with phosphorothioate linkage
  modified_base 97: mod_base = OTHER; note = Nucleotide with phosphorothioate linkage
  modified_base 98: mod_base = OTHER; note = 2'-O-methyl modified nucleotide with phosphorothioate linkage
  modified_base 99: mod_base = OTHER; note = 2'-O-methyl modified nucleotide with phosphorothioate linkage
  modified_base 100: mod_base = OTHER; note = 2'-O-methyl modified nucleotide

SEQ ID NO: 304 - RNA, 100 nt, synthetic construct; identical to SEQ ID NO: 193
  source 1..100: mol_type = other RNA
  modified_base 1: mod_base = OTHER; note = 2'-O-methyl modified nucleotide with phosphorothioate linkage
  modified_base 2: mod_base = OTHER; note = 2'-O-methyl modified nucleotide with phosphorothioate linkage
  modified_base 3: mod_base = OTHER; note = 2'-O-methyl modified nucleotide with phosphorothioate linkage
  modified_base 97: mod_base = OTHER; note = Nucleotide with phosphorothioate linkage
  modified_base 98: mod_base = OTHER; note = 2'-O-methyl modified nucleotide with phosphorothioate linkage
  modified_base 99: mod_base = OTHER; note = 2'-O-methyl modified nucleotide with phosphorothioate linkage
  modified_base 100: mod_base = OTHER; note = 2'-O-methyl modified nucleotide

SEQ ID NO: 305 - RNA, 100 nt, synthetic construct; identical to SEQ ID NO: 194
  source 1..100: mol_type = other RNA
  modified_base 1: mod_base = OTHER; note = 2'-O-methyl modified nucleotide with phosphorothioate linkage
  modified_base 2: mod_base = OTHER; note = 2'-O-methyl modified nucleotide with phosphorothioate linkage
  modified_base 3: mod_base = OTHER; note = 2'-O-methyl modified nucleotide with phosphorothioate linkage
  modified_base 97: mod_base = OTHER; note = Nucleotide with phosphorothioate linkage
  modified_base 98: mod_base = OTHER; note = 2'-O-methyl modified nucleotide with phosphorothioate linkage
  modified_base 99: mod_base = OTHER; note = 2'-O-methyl modified nucleotide with phosphorothioate linkage
  modified_base 100: mod_base = OTHER; note = 2'-O-methyl modified nucleotide

SEQ ID NO: 306 - RNA, 100 nt, synthetic construct; identical to SEQ ID NO: 195
  source 1..100: mol_type = other RNA
  modified_base 1: mod_base = OTHER; note = 2'-O-methyl modified nucleotide with phosphorothioate linkage
  modified_base 2: mod_base = OTHER; note = 2'-O-methyl modified nucleotide with phosphorothioate linkage
  modified_base 3: mod_base = OTHER; note = 2'-O-methyl modified nucleotide with phosphorothioate linkage
  modified_base 97: mod_base = OTHER; note = Nucleotide with phosphorothioate linkage
  modified_base 98: mod_base = OTHER; note = 2'-O-methyl modified nucleotide with phosphorothioate linkage
  modified_base 99: mod_base = OTHER; note = 2'-O-methyl modified nucleotide with phosphorothioate linkage
  modified_base 100: mod_base = OTHER; note = 2'-O-methyl modified nucleotide

SEQ ID NO: 307 - RNA, 100 nt, synthetic construct; identical to SEQ ID NO: 196
  source 1..100: mol_type = other RNA
  modified_base 1: mod_base = OTHER; note = 2'-O-methyl modified nucleotide with phosphorothioate linkage
  modified_base 2: mod_base = OTHER; note = 2'-O-methyl modified nucleotide with phosphorothioate linkage
  modified_base 3: mod_base = OTHER; note = 2'-O-methyl modified nucleotide with phosphorothioate linkage
  modified_base 97: mod_base = OTHER; note = Nucleotide with phosphorothioate linkage
  modified_base 98: mod_base = OTHER; note = 2'-O-methyl modified nucleotide with phosphorothioate linkage
  modified_base 99: mod_base = OTHER; note = 2'-O-methyl modified nucleotide with phosphorothioate linkage
  modified_base 100: mod_base = OTHER; note = 2'-O-methyl modified nucleotide

SEQ ID NO: 308 - RNA, 100 nt, synthetic construct; identical to SEQ ID NO: 197
  source 1..100: mol_type = other RNA
  modified_base 1: mod_base = OTHER; note = 2'-O-methyl modified nucleotide with phosphorothioate linkage
  modified_base 2: mod_base = OTHER; note = 2'-O-methyl modified nucleotide with phosphorothioate linkage
  modified_base 3: mod_base = OTHER; note = 2'-O-methyl modified nucleotide with phosphorothioate linkage
  modified_base 97: mod_base = OTHER; note = Nucleotide with phosphorothioate linkage
  modified_base 98: mod_base = OTHER; note = 2'-O-methyl modified nucleotide with phosphorothioate linkage
  modified_base 99: mod_base = OTHER; note = 2'-O-methyl modified nucleotide with phosphorothioate linkage
  modified_base 100: mod_base = OTHER; note = 2'-O-methyl modified nucleotide

SEQ ID NO: 309 - RNA, 100 nt, synthetic construct; identical to SEQ ID NO: 198
  source 1..100: mol_type = other RNA
  modified_base 1: mod_base = OTHER; note = 2'-O-methyl modified nucleotide with phosphorothioate linkage
  modified_base 2: mod_base = OTHER; note = 2'-O-methyl modified nucleotide with phosphorothioate linkage
  modified_base 3: mod_base = OTHER; note = 2'-O-methyl modified nucleotide with phosphorothioate linkage
  modified_base 97: mod_base = OTHER; note = Nucleotide with phosphorothioate linkage
  modified_base 98: mod_base = OTHER; note = 2'-O-methyl modified nucleotide with phosphorothioate linkage
  modified_base 99: mod_base = OTHER; note = 2'-O-methyl modified nucleotide with phosphorothioate linkage
  modified_base 100: mod_base = OTHER; note = 2'-O-methyl modified nucleotide

SEQ ID NO: 310 - RNA, 100 nt, synthetic construct; identical to SEQ ID NO: 199
  source 1..100: mol_type = other RNA
  modified_base 1: mod_base = OTHER; note = 2'-O-methyl modified nucleotide with phosphorothioate linkage
  modified_base 2: mod_base = OTHER; note = 2'-O-methyl modified nucleotide with phosphorothioate linkage
  modified_base 3: mod_base = OTHER; note = 2'-O-methyl modified nucleotide with phosphorothioate linkage
  modified_base 97: mod_base = OTHER; note = Nucleotide with phosphorothioate linkage
  modified_base 98: mod_base = OTHER; note = 2'-O-methyl modified nucleotide with phosphorothioate linkage
  modified_base 99: mod_base = OTHER; note = 2'-O-methyl modified nucleotide with phosphorothioate linkage
  modified_base 100: mod_base = OTHER; note = 2'-O-methyl modified nucleotide

SEQ ID NO: 311 - RNA, 100 nt, synthetic construct; identical to SEQ ID NO: 200
  source 1..100: mol_type = other RNA
  modified_base 1: mod_base = OTHER; note = 2'-O-methyl modified nucleotide with phosphorothioate linkage
  modified_base 2: mod_base = OTHER; note = 2'-O-methyl modified nucleotide with phosphorothioate linkage
  modified_base 3: mod_base = OTHER; note = 2'-O-methyl modified nucleotide with phosphorothioate linkage
  modified_base 97: mod_base = OTHER; note = Nucleotide with phosphorothioate linkage
  modified_base 98: mod_base = OTHER; note = 2'-O-methyl modified nucleotide with phosphorothioate linkage
  modified_base 99: mod_base = OTHER; note = 2'-O-methyl modified nucleotide with phosphorothioate linkage
  modified_base 100: mod_base = OTHER; note = 2'-O-methyl modified nucleotide

SEQ ID NO: 312 - RNA, 100 nt, synthetic construct; identical to SEQ ID NO: 201
  source 1..100: mol_type = other RNA
  modified_base 1: mod_base = OTHER; note = 2'-O-methyl modified nucleotide with phosphorothioate linkage
  modified_base 2: mod_base = OTHER; note = 2'-O-methyl modified nucleotide with phosphorothioate linkage
  modified_base 3: mod_base = OTHER; note = 2'-O-methyl modified nucleotide with phosphorothioate linkage
  modified_base 97: mod_base = OTHER; note = Nucleotide with phosphorothioate linkage
  modified_base 98: mod_base = OTHER; note = 2'-O-methyl modified nucleotide with phosphorothioate linkage
  modified_base 99: mod_base = OTHER; note = 2'-O-methyl modified nucleotide with phosphorothioate linkage
  modified_base 100: mod_base = OTHER; note = 2'-O-methyl modified nucleotide

SEQ ID NO: 313 - RNA, 100 nt, synthetic construct; identical to SEQ ID NO: 202
  source 1..100: mol_type = other RNA
  modified_base 1: mod_base = OTHER; note = 2'-O-methyl modified nucleotide with phosphorothioate linkage
  modified_base 2: mod_base = OTHER; note = 2'-O-methyl modified nucleotide with phosphorothioate linkage
  modified_base 3: mod_base = OTHER; note = 2'-O-methyl modified nucleotide with phosphorothioate linkage
  modified_base 97: mod_base = OTHER; note = Nucleotide with phosphorothioate linkage
  modified_base 98: mod_base = OTHER; note = 2'-O-methyl modified nucleotide with phosphorothioate linkage
  modified_base 99: mod_base = OTHER; note = 2'-O-methyl modified nucleotide with phosphorothioate linkage
  modified_base 100: mod_base = OTHER; note = 2'-O-methyl modified nucleotide

SEQ ID NO: 314 - RNA, 100 nt, synthetic construct; identical to SEQ ID NO: 203
  source 1..100: mol_type = other RNA
  modified_base 1: mod_base = OTHER; note = 2'-O-methyl modified nucleotide with phosphorothioate linkage
  modified_base 2: mod_base = OTHER; note = 2'-O-methyl modified nucleotide with phosphorothioate linkage
  modified_base 3: mod_base = OTHER; note = 2'-O-methyl modified nucleotide with phosphorothioate linkage
  modified_base 97: mod_base = OTHER; note = Nucleotide with phosphorothioate linkage
  modified_base 98: mod_base = OTHER; note = 2'-O-methyl modified nucleotide with phosphorothioate linkage
  modified_base 99: mod_base = OTHER; note = 2'-O-methyl modified nucleotide with phosphorothioate linkage
  modified_base 100: mod_base = OTHER; note = 2'-O-methyl modified nucleotide

SEQ ID NO: 315 - RNA, 100 nt, synthetic construct; identical to SEQ ID NO: 204
  source 1..100: mol_type = other RNA
  modified_base 1: mod_base = OTHER; note = 2'-O-methyl modified nucleotide with phosphorothioate linkage
  modified_base 2: mod_base = OTHER; note = 2'-O-methyl modified nucleotide with phosphorothioate linkage
  modified_base 3: mod_base = OTHER; note = 2'-O-methyl modified nucleotide with phosphorothioate linkage
  modified_base 97: mod_base = OTHER; note = Nucleotide with phosphorothioate linkage
  modified_base 98: mod_base = OTHER; note = 2'-O-methyl modified nucleotide with phosphorothioate linkage
  modified_base 99: mod_base = OTHER; note = 2'-O-methyl modified nucleotide with phosphorothioate linkage
  modified_base 100: mod_base = OTHER; note = 2'-O-methyl modified nucleotide

SEQ ID NO: 316 - RNA, 100 nt, synthetic construct; identical to SEQ ID NO: 205
  source 1..100: mol_type = other RNA
  modified_base 1: mod_base = OTHER; note = 2'-O-methyl modified nucleotide with phosphorothioate linkage
  modified_base 2: mod_base = OTHER; note = 2'-O-methyl modified nucleotide with phosphorothioate linkage
  modified_base 3: mod_base = OTHER; note = 2'-O-methyl modified nucleotide with phosphorothioate linkage
  modified_base 97: mod_base = OTHER; note = Nucleotide with phosphorothioate linkage
  modified_base 98: mod_base = OTHER; note = 2'-O-methyl modified nucleotide with phosphorothioate linkage
  modified_base 99: mod_base = OTHER; note = 2'-O-methyl modified nucleotide with phosphorothioate linkage
  modified_base 100: mod_base = OTHER; note = 2'-O-methyl modified nucleotide

SEQ ID NO: 317 - RNA, 100 nt, synthetic construct; identical to SEQ ID NO: 206
  source 1..100: mol_type = other RNA
  modified_base 1: mod_base = OTHER; note = 2'-O-methyl modified nucleotide with phosphorothioate linkage
  modified_base 2: mod_base = OTHER; note = 2'-O-methyl modified nucleotide with phosphorothioate linkage
  modified_base 3: mod_base = OTHER; note = 2'-O-methyl modified nucleotide with phosphorothioate linkage
  modified_base 97: mod_base = OTHER; note = Nucleotide with phosphorothioate linkage
  modified_base 98: mod_base = OTHER; note = 2'-O-methyl modified nucleotide with phosphorothioate linkage
  modified_base 99: mod_base = OTHER; note = 2'-O-methyl modified nucleotide with phosphorothioate linkage
  modified_base 100: mod_base = OTHER; note = 2'-O-methyl modified nucleotide

SEQ ID NO: 318 - RNA, 100 nt, synthetic construct; identical to SEQ ID NO: 207
  source 1..100: mol_type = other RNA
  modified_base 1: mod_base = OTHER; note = 2'-O-methyl modified nucleotide with phosphorothioate linkage
  modified_base 2: mod_base = OTHER; note = 2'-O-methyl modified nucleotide with phosphorothioate linkage
  modified_base 3: mod_base = OTHER; note = 2'-O-methyl modified nucleotide with phosphorothioate linkage
  modified_base 97: mod_base = OTHER; note = Nucleotide with phosphorothioate linkage
  modified_base 98: mod_base = OTHER; note = 2'-O-methyl modified nucleotide with phosphorothioate linkage
  modified_base 99: mod_base = OTHER; note = 2'-O-methyl modified nucleotide with phosphorothioate linkage
  modified_base 100: mod_base = OTHER; note = 2'-O-methyl modified nucleotide

SEQ ID NO: 319 - RNA, 100 nt, synthetic construct; identical to SEQ ID NO: 208
  source 1..100: mol_type = other RNA
  modified_base 1: mod_base = OTHER; note = 2'-O-methyl modified nucleotide with phosphorothioate linkage
  modified_base 2: mod_base = OTHER; note = 2'-O-methyl modified nucleotide with phosphorothioate linkage
  modified_base 3: mod_base = OTHER; note = 2'-O-methyl modified nucleotide with phosphorothioate linkage
  modified_base 97: mod_base = OTHER; note = Nucleotide with phosphorothioate linkage
  modified_base 98: mod_base = OTHER; note = 2'-O-methyl modified nucleotide with phosphorothioate linkage
  modified_base 99: mod_base = OTHER; note = 2'-O-methyl modified nucleotide with phosphorothioate linkage
  modified_base 100: mod_base = OTHER; note = 2'-O-methyl modified nucleotide

SEQ ID NO: 320 - RNA, 100 nt, synthetic construct; identical to SEQ ID NO: 209
  source 1..100: mol_type = other RNA
  modified_base 1: mod_base = OTHER; note = 2'-O-methyl modified nucleotide with phosphorothioate linkage
  modified_base 2: mod_base = OTHER; note = 2'-O-methyl modified nucleotide with phosphorothioate linkage
  modified_base 3: mod_base = OTHER; note = 2'-O-methyl modified nucleotide with phosphorothioate linkage
  modified_base 97: mod_base = OTHER; note = Nucleotide with phosphorothioate linkage
  modified_base 98: mod_base = OTHER; note = 2'-O-methyl modified nucleotide with phosphorothioate linkage
  modified_base 99: mod_base = OTHER; note = 2'-O-methyl modified nucleotide with phosphorothioate linkage
  modified_base 100: mod_base = OTHER; note = 2'-O-methyl modified nucleotide

SEQ ID NO: 321 - RNA, 100 nt, synthetic construct; identical to SEQ ID NO: 210
  source 1..100: mol_type = other RNA
  modified_base 1: mod_base = OTHER; note = 2'-O-methyl modified nucleotide with phosphorothioate linkage
  modified_base 2: mod_base = OTHER; note = 2'-O-methyl modified nucleotide with phosphorothioate linkage
  modified_base 3: mod_base = OTHER; note = 2'-O-methyl modified nucleotide with phosphorothioate linkage
  modified_base 97: mod_base = OTHER; note = Nucleotide with phosphorothioate linkage
  modified_base 98: mod_base = OTHER; note = 2'-O-methyl modified nucleotide with phosphorothioate linkage
  modified_base 99: mod_base = OTHER; note = 2'-O-methyl modified nucleotide with phosphorothioate linkage
  modified_base 100: mod_base = OTHER; note = 2'-O-methyl modified nucleotide

SEQ ID NO: 322 - RNA, 100 nt, synthetic construct; identical to SEQ ID NO: 211
  source 1..100: mol_type = other RNA
  modified_base 1: mod_base = OTHER; note = 2'-O-methyl modified nucleotide with phosphorothioate linkage
  modified_base 2: mod_base = OTHER; note = 2'-O-methyl modified nucleotide with phosphorothioate linkage
  modified_base 3: mod_base = OTHER; note = 2'-O-methyl modified nucleotide with phosphorothioate linkage
  modified_base 97: mod_base = OTHER; note = Nucleotide with phosphorothioate linkage
  modified_base 98: mod_base = OTHER; note = 2'-O-methyl modified nucleotide with phosphorothioate linkage
  modified_base 99: mod_base = OTHER; note = 2'-O-methyl modified nucleotide with phosphorothioate linkage
  modified_base 100: mod_base = OTHER; note = 2'-O-methyl modified nucleotide

SEQ ID NO: 323 - RNA, 100 nt, synthetic construct; identical to SEQ ID NO: 212
  source 1..100: mol_type = other RNA
  modified_base 1: mod_base = OTHER; note = 2'-O-methyl modified nucleotide with phosphorothioate linkage
  modified_base 2: mod_base = OTHER; note = 2'-O-methyl modified nucleotide with phosphorothioate linkage
  modified_base 3: mod_base = OTHER; note = 2'-O-methyl modified nucleotide with phosphorothioate linkage
  modified_base 97: mod_base = OTHER; note = Nucleotide with phosphorothioate linkage
  modified_base 98: mod_base = OTHER; note = 2'-O-methyl modified nucleotide with phosphorothioate linkage
  modified_base 99: mod_base = OTHER; note = 2'-O-methyl modified nucleotide with phosphorothioate linkage
  modified_base 100: mod_base = OTHER; note = 2'-O-methyl modified nucleotide

SEQ ID NO: 324 - RNA, 100 nt, synthetic construct; identical to SEQ ID NO: 213
  source 1..100: mol_type = other RNA
  modified_base 1: mod_base = OTHER; note = 2'-O-methyl modified nucleotide with phosphorothioate linkage
  modified_base 2: mod_base = OTHER; note = 2'-O-methyl modified nucleotide with phosphorothioate linkage
  modified_base 3: mod_base = OTHER; note = 2'-O-methyl modified nucleotide with phosphorothioate linkage
  modified_base 97: mod_base = OTHER; note = Nucleotide with phosphorothioate linkage
  modified_base 98: mod_base = OTHER; note = 2'-O-methyl modified nucleotide with phosphorothioate linkage
  modified_base 99: mod_base = OTHER; note = 2'-O-methyl modified nucleotide with phosphorothioate linkage
  modified_base 100: mod_base = OTHER; note = 2'-O-methyl modified nucleotide

SEQ ID NO: 325 - RNA, 100 nt, synthetic construct; identical to SEQ ID NO: 214
  source 1..100: mol_type = other RNA
  modified_base 1: mod_base = OTHER; note = 2'-O-methyl modified nucleotide with phosphorothioate linkage
  modified_base 2: mod_base = OTHER; note = 2'-O-methyl modified nucleotide with phosphorothioate linkage
  modified_base 3: mod_base = OTHER; note = 2'-O-methyl modified nucleotide with phosphorothioate linkage
  modified_base 97: mod_base = OTHER; note = Nucleotide with phosphorothioate linkage
  modified_base 98: mod_base = OTHER; note = 2'-O-methyl modified nucleotide with phosphorothioate linkage
  modified_base 99: mod_base = OTHER; note = 2'-O-methyl modified nucleotide with phosphorothioate linkage
  modified_base 100: mod_base = OTHER; note = 2'-O-methyl modified nucleotide

SEQ ID NO: 326 - RNA, 100 nt, synthetic construct; identical to SEQ ID NO: 215
  source 1..100: mol_type = other RNA
  modified_base 1: mod_base = OTHER; note = 2'-O-methyl modified nucleotide with phosphorothioate linkage
  modified_base 2: mod_base = OTHER; note = 2'-O-methyl modified nucleotide with phosphorothioate linkage
  modified_base 3: mod_base = OTHER; note = 2'-O-methyl modified nucleotide with phosphorothioate linkage
  modified_base 97: mod_base = OTHER; note = Nucleotide with phosphorothioate linkage
  modified_base 98: mod_base = OTHER; note = 2'-O-methyl modified nucleotide with phosphorothioate linkage
  modified_base 99: mod_base = OTHER; note = 2'-O-methyl modified nucleotide with phosphorothioate linkage
  modified_base 100: mod_base = OTHER; note = 2'-O-methyl modified nucleotide

SEQ ID NO: 327 - RNA, 100 nt, synthetic construct; identical to SEQ ID NO: 216
  source 1..100: mol_type = other RNA
  modified_base 1: mod_base = OTHER; note = 2'-O-methyl modified nucleotide with phosphorothioate linkage
  modified_base 2: mod_base = OTHER; note = 2'-O-methyl modified nucleotide with phosphorothioate linkage
  modified_base 3: mod_base = OTHER; note = 2'-O-methyl modified nucleotide with phosphorothioate linkage
  modified_base 97: mod_base = OTHER; note = Nucleotide with phosphorothioate linkage
  modified_base 98: mod_base = OTHER; note = 2'-O-methyl modified nucleotide with phosphorothioate linkage
  modified_base 99: mod_base = OTHER; note = 2'-O-methyl modified nucleotide with phosphorothioate linkage
  modified_base 100: mod_base = OTHER; note = 2'-O-methyl modified nucleotide

SEQ ID NO: 328 - RNA, 100 nt, synthetic construct; identical to SEQ ID NO: 217
  source 1..100: mol_type = other RNA
  modified_base 1: mod_base = OTHER; note = 2'-O-methyl modified nucleotide with phosphorothioate linkage
  modified_base 2: mod_base = OTHER; note = 2'-O-methyl modified nucleotide with phosphorothioate linkage
  modified_base 3: mod_base = OTHER; note = 2'-O-methyl modified nucleotide with phosphorothioate linkage
  modified_base 97: mod_base = OTHER; note = Nucleotide with phosphorothioate linkage
  modified_base 98: mod_base = OTHER; note = 2'-O-methyl modified nucleotide with phosphorothioate linkage
  modified_base 99: mod_base = OTHER; note = 2'-O-methyl modified nucleotide with phosphorothioate linkage
  modified_base 100: mod_base = OTHER; note = 2'-O-methyl modified nucleotide

SEQ ID NO: 329 - RNA, 100 nt, synthetic construct; identical to SEQ ID NO: 218
  source 1..100: mol_type = other RNA
  modified_base 1: mod_base = OTHER; note = 2'-O-methyl modified nucleotide with phosphorothioate linkage
  modified_base 2: mod_base = OTHER; note = 2'-O-methyl modified nucleotide with phosphorothioate linkage
  modified_base 3: mod_base = OTHER; note = 2'-O-methyl modified nucleotide with phosphorothioate linkage
  modified_base 97: mod_base = OTHER; note = Nucleotide with phosphorothioate linkage
  modified_base 98: mod_base = OTHER; note = 2'-O-methyl modified nucleotide with phosphorothioate linkage
  modified_base 99: mod_base = OTHER; note = 2'-O-methyl modified nucleotide with phosphorothioate linkage
  modified_base 100: mod_base = OTHER; note = 2'-O-methyl modified nucleotide

SEQ ID NO: 330 - RNA, 100 nt, synthetic construct; identical to SEQ ID NO: 219
  source 1..100: mol_type = other RNA
  modified_base 1: mod_base = OTHER; note = 2'-O-methyl modified nucleotide with phosphorothioate linkage
  modified_base 2: mod_base = OTHER; note = 2'-O-methyl modified nucleotide with phosphorothioate linkage
  modified_base 3: mod_base = OTHER; note = 2'-O-methyl modified nucleotide with phosphorothioate linkage
  modified_base 97: mod_base = OTHER; note = Nucleotide with phosphorothioate linkage
  modified_base 98: mod_base = OTHER; note = 2'-O-methyl modified nucleotide with phosphorothioate linkage
  modified_base 99: mod_base = OTHER; note = 2'-O-methyl modified nucleotide with phosphorothioate linkage
  modified_base 100: mod_base = OTHER; note = 2'-O-methyl modified nucleotide

SEQ ID NO: 331 - RNA, 100 nt, synthetic construct; identical to SEQ ID NO: 220
  source 1..100: mol_type = other RNA
  modified_base 1: mod_base = OTHER; note = 2'-O-methyl modified nucleotide with phosphorothioate linkage
  modified_base 2: mod_base = OTHER; note = 2'-O-methyl modified nucleotide with phosphorothioate linkage
  modified_base 3: mod_base = OTHER; note = 2'-O-methyl modified nucleotide with phosphorothioate linkage
  modified_base 97: mod_base = OTHER; note = Nucleotide with phosphorothioate linkage
  modified_base 98: mod_base = OTHER; note = 2'-O-methyl modified nucleotide with phosphorothioate linkage
  modified_base 99: mod_base = OTHER; note = 2'-O-methyl modified nucleotide with phosphorothioate linkage
  modified_base 100: mod_base = OTHER; note = 2'-O-methyl modified nucleotide

SEQ ID NO: 332 - RNA, 100 nt, synthetic construct; identical to SEQ ID NO: 221
  source 1..100: mol_type = other RNA
  modified_base 1: mod_base = OTHER; note = 2'-O-methyl modified nucleotide with phosphorothioate linkage
  modified_base 2: mod_base = OTHER; note = 2'-O-methyl modified nucleotide with phosphorothioate linkage
  modified_base 3: mod_base = OTHER; note = 2'-O-methyl modified nucleotide with phosphorothioate linkage
  modified_base 97: mod_base = OTHER; note = Nucleotide with phosphorothioate linkage
  modified_base 98: mod_base = OTHER; note = 2'-O-methyl modified nucleotide with phosphorothioate linkage
  modified_base 99: mod_base = OTHER; note = 2'-O-methyl modified nucleotide with phosphorothioate linkage
  modified_base 100: mod_base = OTHER; note = 2'-O-methyl modified nucleotide

SEQ ID NO: 333 - RNA, 100 nt, synthetic construct; identical to SEQ ID NO: 221
  source 1..100: mol_type = other RNA
  modified_base 1: mod_base = OTHER; note = 2'-O-methyl modified nucleotide with phosphorothioate linkage
  modified_base 2: mod_base = OTHER; note = 2'-O-methyl modified nucleotide with phosphorothioate linkage
  modified_base 3: mod_base = OTHER; note = 2'-O-methyl modified nucleotide with phosphorothioate linkage
  modified_base 21: mod_base = OTHER; note = 2'-O-methyl modified nucleotide
  modified_base 28: mod_base = OTHER; note = 2'-O-methyl modified nucleotide
  modified_base 29: mod_base = OTHER; note = 2'-O-methyl modified nucleotide
  modified_base 30: mod_base = OTHER; note = 2'-O-methyl modified nucleotide
  modified_base 31: mod_base = OTHER; note = 2'-O-methyl modified nucleotide
  modified_base 32: mod_base = OTHER; note = 2'-O-methyl modified nucleotide
  modified_base 34: mod_base = OTHER; note = 2'-O-methyl modified nucleotide
  modified_base 35: mod_base = OTHER; note = 2'-O-methyl modified nucleotide
  modified_base 36: mod_base = OTHER; note = 2'-O-methyl modified nucleotide
  modified_base 37: mod_base = OTHER; note = 2'-O-methyl modified nucleotide
  modified_base 38: mod_base = OTHER; note = 2'-O-methyl modified nucleotide
  modified_base 39: mod_base = OTHER; note = 2'-O-methyl modified nucleotide
  modified_base 40: mod_base = OTHER; note = 2'-O-methyl modified nucleotide
  modified_base 41: mod_base = OTHER; note = 2'-O-methyl modified nucleotide
  modified_base 42: mod_base = OTHER; note = 2'-O-methyl modified nucleotide
  modified_base 46: mod_base = OTHER; note = 2'-O-methyl modified nucleotide
  modified_base 48: mod_base = OTHER; note = 2'-O-methyl modified nucleotide
  modified_base 50: mod_base = OTHER; note = 2'-O-methyl modified nucleotide
  modified_base 52: mod_base = OTHER; note = 2'-O-methyl modified nucleotide
  modified_base 53: mod_base = OTHER; note = 2'-O-methyl modified nucleotide
  modified_base 54: mod_base = OTHER; note = 2'-O-methyl modified nucleotide
  modified_base 55: mod_base = OTHER; note = 2'-O-methyl modified nucleotide
  modified_base 56: mod_base = OTHER; note = 2'-O-methyl modified nucleotide
  modified_base 57: mod_base = OTHER; note = 2'-O-methyl modified nucleotide
  modified_base 60: mod_base = OTHER; note = 2'-O-methyl modified nucleotide
  modified_base 61: mod_base = OTHER; note = 2'-O-methyl modified nucleotide
  modified_base 66: mod_base = OTHER; note = 2'-O-methyl modified nucleotide
  modified_base 67: mod_base = OTHER; note = 2'-O-methyl modified nucleotide
  modified_base 70: mod_base = OTHER; note = 2'-O-methyl modified nucleotide
  modified_base 71: mod_base = OTHER; note = 2'-O-methyl modified nucleotide
  modified_base 72: mod_base = OTHER; note = 2'-O-methyl modified nucleotide
  modified_base 74: mod_base = OTHER; note = 2'-O-methyl modified nucleotide
  modified_base 75: mod_base = OTHER; note = 2'-O-methyl modified nucleotide
  modified_base 76: mod_base = OTHER; note = 2'-O-methyl modified nucleotide
  modified_base 77: mod_base = OTHER; note = 2'-O-methyl modified nucleotide
  modified_base 78: mod_base = OTHER; note = 2'-O-methyl modified nucleotide
  modified_base 79: mod_base = OTHER; note = 2'-O-methyl modified nucleotide
  modified_base 80: mod_base = OTHER; note = 2'-O-methyl modified nucleotide
  modified_base 81: mod_base = OTHER; note = 2'-O-methyl modified nucleotide
  modified_base 83: mod_base = OTHER; note = 2'-O-methyl modified nucleotide
  modified_base 84: mod_base = OTHER; note = 2'-O-methyl modified nucleotide
  modified_base 85: mod_base = OTHER; note = 2'-O-methyl modified nucleotide
  modified_base 86: mod_base = OTHER; note = 2'-O-methyl modified nucleotide
  modified_base 87: mod_base = OTHER; note = 2'-O-methyl modified nucleotide
  modified_base 88: mod_base = OTHER; note = 2'-O-methyl modified nucleotide
  modified_base 89: mod_base = OTHER; note = 2'-O-methyl modified nucleotide
  modified_base 90: mod_base = OTHER; note = 2'-O-methyl modified nucleotide
  modified_base 91: mod_base = OTHER; note = 2'-O-methyl modified nucleotide
  modified_base 92: mod_base = OTHER; note = 2'-O-methyl modified nucleotide
  modified_base 93: mod_base = OTHER; note = 2'-O-methyl modified nucleotide
  modified_base 94: mod_base = OTHER; note = 2'-O-methyl modified nucleotide
  modified_base 95: mod_base = OTHER; note = 2'-O-methyl modified nucleotide
  modified_base 96: mod_base = OTHER; note = 2'-O-methyl modified nucleotide
  modified_base 97: mod_base = OTHER; note = 2'-O-methyl modified nucleotide with phosphorothioate linkage
  modified_base 98: mod_base = OTHER; note = 2'-O-methyl modified nucleotide with phosphorothioate linkage
  modified_base 99: mod_base = OTHER; note = 2'-O-methyl modified nucleotide with phosphorothioate linkage
  modified_base 100: mod_base = OTHER; note = 2'-O-methyl modified nucleotide

SEQ ID NO: 334 - RNA, 100 nt, synthetic construct; identical to SEQ ID NO: 222
  source 1..100: mol_type = other RNA
  modified_base 1: mod_base = OTHER; note = 2'-O-methyl modified nucleotide with phosphorothioate linkage
  modified_base 2: mod_base = OTHER; note = 2'-O-methyl modified nucleotide with phosphorothioate linkage
  modified_base 3: mod_base = OTHER; note = 2'-O-methyl modified nucleotide with phosphorothioate linkage
  modified_base 97: mod_base = OTHER; note = Nucleotide with phosphorothioate linkage
  modified_base 98: mod_base = OTHER; note = 2'-O-methyl modified nucleotide with phosphorothioate linkage
  modified_base 99: mod_base = OTHER; note = 2'-O-methyl modified nucleotide with phosphorothioate linkage
  modified_base 100: mod_base = OTHER; note = 2'-O-methyl modified nucleotide

SEQ ID NO: 335 - RNA, 100 nt, synthetic construct; identical to SEQ ID NO: 222
  source 1..100: mol_type = other RNA
  modified_base 1: mod_base = OTHER; note = 2'-O-methyl modified nucleotide with phosphorothioate linkage
  modified_base 2: mod_base = OTHER; note = 2'-O-methyl modified nucleotide with phosphorothioate linkage
  modified_base 3: mod_base = OTHER; note = 2'-O-methyl modified nucleotide with phosphorothioate linkage
  modified_base 21: mod_base = OTHER; note = 2'-O-methyl modified nucleotide
  modified_base 28: mod_base = OTHER; note = 2'-O-methyl modified nucleotide
  modified_base 29: mod_base = OTHER; note = 2'-O-methyl modified nucleotide
  modified_base 30: mod_base = OTHER; note = 2'-O-methyl modified nucleotide
  modified_base 31: mod_base = OTHER; note = 2'-O-methyl modified nucleotide
  modified_base 32: mod_base = OTHER; note = 2'-O-methyl modified nucleotide
  modified_base 34: mod_base = OTHER; note = 2'-O-methyl modified nucleotide
  modified_base 35: mod_base = OTHER; note = 2'-O-methyl modified nucleotide
  modified_base 36: mod_base = OTHER; note = 2'-O-methyl modified nucleotide
  modified_base 37: mod_base = OTHER; note = 2'-O-methyl modified nucleotide
  modified_base 38: mod_base = OTHER; note = 2'-O-methyl modified nucleotide
  modified_base 39: mod_base = OTHER; note = 2'-O-methyl modified nucleotide
  modified_base 40: mod_base = OTHER; note = 2'-O-methyl modified nucleotide
  modified_base 41: mod_base = OTHER; note = 2'-O-methyl modified nucleotide
  modified_base 42: mod_base = OTHER; note = 2'-O-methyl modified nucleotide
  modified_base 46: mod_base = OTHER; note = 2'-O-methyl modified nucleotide
  modified_base 48: mod_base = OTHER; note = 2'-O-methyl modified nucleotide
  modified_base 50: mod_base = OTHER; note = 2'-O-methyl modified nucleotide
  modified_base 52: mod_base = OTHER; note = 2'-O-methyl modified nucleotide
  modified_base 53: mod_base = OTHER; note = 2'-O-methyl modified nucleotide
  modified_base 54: mod_base = OTHER; note = 2'-O-methyl modified nucleotide
  modified_base 55: mod_base = OTHER; note = 2'-O-methyl modified nucleotide
  modified_base 56: mod_base = OTHER; note = 2'-O-methyl modified nucleotide
  modified_base 57: mod_base = OTHER; note = 2'-O-methyl modified nucleotide
  modified_base 60: mod_base = OTHER; note = 2'-O-methyl modified nucleotide
  modified_base 61: mod_base = OTHER; note = 2'-O-methyl modified nucleotide
  modified_base 66: mod_base = OTHER; note = 2'-O-methyl modified nucleotide
  modified_base 67: mod_base = OTHER; note = 2'-O-methyl modified nucleotide
  modified_base 70: mod_base = OTHER; note = 2'-O-methyl modified nucleotide
  modified_base 71: mod_base = OTHER; note = 2'-O-methyl modified nucleotide
  modified_base 72: mod_base = OTHER; note = 2'-O-methyl modified nucleotide
  modified_base 74: mod_base = OTHER; note = 2'-O-methyl modified nucleotide
  modified_base 75: mod_base = OTHER; note = 2'-O-methyl modified nucleotide
  modified_base 76: mod_base = OTHER; note = 2'-O-methyl modified nucleotide
  modified_base 77: mod_base = OTHER; note = 2'-O-methyl modified nucleotide
  modified_base 78: mod_base = OTHER; note = 2'-O-methyl modified nucleotide
  modified_base 79: mod_base = OTHER; note = 2'-O-methyl modified nucleotide
  modified_base 80: mod_base = OTHER; note = 2'-O-methyl modified nucleotide
  modified_base 81: mod_base = OTHER; note = 2'-O-methyl modified nucleotide
  modified_base 83: mod_base = OTHER; note = 2'-O-methyl modified nucleotide
  modified_base 84: mod_base = OTHER; note = 2'-O-methyl modified nucleotide
  modified_base 85: mod_base = OTHER; note = 2'-O-methyl modified nucleotide
  modified_base 86: mod_base = OTHER; note = 2'-O-methyl modified nucleotide
  modified_base 87: mod_base = OTHER; note = 2'-O-methyl modified nucleotide
  modified_base 88: mod_base = OTHER; note = 2'-O-methyl modified nucleotide
  modified_base 89: mod_base = OTHER; note = 2'-O-methyl modified nucleotide
  modified_base 90: mod_base = OTHER; note = 2'-O-methyl modified nucleotide
  modified_base 91: mod_base = OTHER; note = 2'-O-methyl modified nucleotide
  modified_base 92: mod_base = OTHER; note = 2'-O-methyl modified nucleotide
  modified_base 93: mod_base = OTHER; note = 2'-O-methyl modified nucleotide
  modified_base 94: mod_base = OTHER; note = 2'-O-methyl modified nucleotide
  modified_base 95: mod_base = OTHER; note = 2'-O-methyl modified nucleotide
  modified_base 96: mod_base = OTHER; note = 2'-O-methyl modified nucleotide
  modified_base 97: mod_base = OTHER; note = 2'-O-methyl modified nucleotide with phosphorothioate linkage
  modified_base 98: mod_base = OTHER; note = 2'-O-methyl modified nucleotide with phosphorothioate linkage
  modified_base 99: mod_base = OTHER; note = 2'-O-methyl modified nucleotide with phosphorothioate linkage
  modified_base 100: mod_base = OTHER; note = 2'-O-methyl modified nucleotide

SEQ ID NO: 336 - RNA, 100 nt, synthetic construct; identical to SEQ ID NO: 223
  source 1..100: mol_type = other RNA
  modified_base 1: mod_base = OTHER; note = 2'-O-methyl modified nucleotide with phosphorothioate linkage
  modified_base 2: mod_base = OTHER; note = 2'-O-methyl modified nucleotide with phosphorothioate linkage
  modified_base 3: mod_base = OTHER; note = 2'-O-methyl modified nucleotide with phosphorothioate linkage
  modified_base 97: mod_base = OTHER; note = Nucleotide with phosphorothioate linkage
  modified_base 98: mod_base = OTHER; note = 2'-O-methyl modified nucleotide with phosphorothioate linkage
  modified_base 99: mod_base = OTHER; note = 2'-O-methyl modified nucleotide with phosphorothioate linkage
  modified_base 100: mod_base = OTHER; note = 2'-O-methyl modified nucleotide

SEQ ID NO: 337 - RNA, 100 nt, synthetic construct; identical to SEQ ID NO: 223
  source 1..100: mol_type = other RNA
  modified_base 1: mod_base = OTHER; note = 2'-O-methyl modified nucleotide with phosphorothioate linkage
  modified_base 2: mod_base = OTHER; note = 2'-O-methyl modified nucleotide with phosphorothioate linkage
  modified_base 3: mod_base = OTHER; note = 2'-O-methyl modified nucleotide with phosphorothioate linkage
  modified_base 21: mod_base = OTHER; note = 2'-O-methyl modified nucleotide
  modified_base 28: mod_base = OTHER; note = 2'-O-methyl modified nucleotide
  modified_base 29: mod_base = OTHER; note = 2'-O-methyl modified nucleotide
  modified_base 30: mod_base = OTHER; note = 2'-O-methyl modified nucleotide
  modified_base 31: mod_base = OTHER; note = 2'-O-methyl modified nucleotide
  modified_base 32: mod_base = OTHER; note = 2'-O-methyl modified nucleotide
  modified_base 34: mod_base = OTHER; note = 2'-O-methyl modified nucleotide
  modified_base 35: mod_base = OTHER; note = 2'-O-methyl modified nucleotide
  modified_base 36: mod_base = OTHER; note = 2'-O-methyl modified nucleotide
  modified_base 37: mod_base = OTHER; note = 2'-O-methyl modified nucleotide
  modified_base 38: mod_base = OTHER; note = 2'-O-methyl modified nucleotide
  modified_base 39: mod_base = OTHER; note = 2'-O-methyl modified nucleotide
  modified_base 40: mod_base = OTHER; note = 2'-O-methyl modified nucleotide
  modified_base 41: mod_base = OTHER; note = 2'-O-methyl modified nucleotide
  modified_base 42: mod_base = OTHER; note = 2'-O-methyl modified nucleotide
  modified_base 46: mod_base = OTHER; note = 2'-O-methyl modified nucleotide
  modified_base 48: mod_base = OTHER; note = 2'-O-methyl modified nucleotide
  modified_base 50: mod_base = OTHER; note = 2'-O-methyl modified nucleotide
  modified_base 52: mod_base = OTHER; note = 2'-O-methyl modified nucleotide
  modified_base 53: mod_base = OTHER; note = 2'-O-methyl modified nucleotide
  modified_base 54: mod_base = OTHER; note = 2'-O-methyl modified nucleotide
  modified_base 55: mod_base = OTHER; note = 2'-O-methyl modified nucleotide
  modified_base 56: mod_base = OTHER; note = 2'-O-methyl modified nucleotide
  modified_base 57: mod_base = OTHER; note = 2'-O-methyl modified nucleotide
  modified_base 60: mod_base = OTHER; note = 2'-O-methyl modified nucleotide
  modified_base 61: mod_base = OTHER; note = 2'-O-methyl modified nucleotide
  modified_base 66: mod_base = OTHER; note = 2'-O-methyl modified nucleotide
  modified_base 67: mod_base = OTHER; note = 2'-O-methyl modified nucleotide
  modified_base 70: mod_base = OTHER; note = 2'-O-methyl modified nucleotide
  modified_base 71: mod_base = OTHER; note = 2'-O-methyl modified nucleotide
  modified_base 72: mod_base = OTHER; note = 2'-O-methyl modified nucleotide
  modified_base 74: mod_base = OTHER; note = 2'-O-methyl modified nucleotide
  modified_base 75: mod_base = OTHER; note = 2'-O-methyl modified nucleotide
  modified_base 76: mod_base = OTHER; note = 2'-O-methyl modified nucleotide
  modified_base 77: mod_base = OTHER; note = 2'-O-methyl modified nucleotide
  modified_base 78: mod_base = OTHER; note = 2'-O-methyl modified nucleotide
  modified_base 79: mod_base = OTHER; note = 2'-O-methyl modified nucleotide
  modified_base 80: mod_base = OTHER; note = 2'-O-methyl modified nucleotide
  modified_base 81: mod_base = OTHER; note = 2'-O-methyl modified nucleotide
  modified_base 83: mod_base = OTHER; note = 2'-O-methyl modified nucleotide
  modified_base 84: mod_base = OTHER; note = 2'-O-methyl modified nucleotide
  modified_base 85: mod_base = OTHER; note = 2'-O-methyl modified nucleotide
  modified_base 86: mod_base = OTHER; note = 2'-O-methyl modified nucleotide
  modified_base 87: mod_base = OTHER; note = 2'-O-methyl modified nucleotide
  modified_base 88: mod_base = OTHER; note = 2'-O-methyl modified nucleotide
  modified_base 89: mod_base = OTHER; note = 2'-O-methyl modified nucleotide
  modified_base 90: mod_base = OTHER; note = 2'-O-methyl modified nucleotide
  modified_base 91: mod_base = OTHER; note = 2'-O-methyl modified nucleotide
  modified_base 92: mod_base = OTHER; note = 2'-O-methyl modified nucleotide
  modified_base 93: mod_base = OTHER; note = 2'-O-methyl modified nucleotide
  modified_base 94: mod_base = OTHER; note = 2'-O-methyl modified nucleotide
  modified_base 95: mod_base = OTHER; note = 2'-O-methyl modified nucleotide
  modified_base 96: mod_base = OTHER; note = 2'-O-methyl modified nucleotide
  modified_base 97: mod_base = OTHER; note = 2'-O-methyl modified nucleotide with phosphorothioate linkage
  modified_base 98: mod_base = OTHER; note = 2'-O-methyl modified nucleotide with phosphorothioate linkage
  modified_base 99: mod_base = OTHER; note = 2'-O-methyl modified nucleotide with phosphorothioate linkage
  modified_base 100: mod_base = OTHER; note = 2'-O-methyl modified nucleotide

SEQ ID NO: 338 - RNA, 100 nt, synthetic construct; identical to SEQ ID NO: 224
  source 1..100: mol_type = other RNA
  modified_base 1: mod_base = OTHER; note = 2'-O-methyl modified nucleotide with phosphorothioate linkage
  modified_base 2: mod_base = OTHER; note = 2'-O-methyl modified nucleotide with phosphorothioate linkage
  modified_base 3: mod_base = OTHER; note = 2'-O-methyl modified nucleotide with phosphorothioate linkage
  modified_base 97: mod_base = OTHER; note = Nucleotide with phosphorothioate linkage
  modified_base 98: mod_base = OTHER; note = 2'-O-methyl modified nucleotide with phosphorothioate linkage
  modified_base 99: mod_base = OTHER; note = 2'-O-methyl modified nucleotide with phosphorothioate linkage
  modified_base 100: mod_base = OTHER; note = 2'-O-methyl modified nucleotide

SEQ ID NO: 339 - RNA, 100 nt, synthetic construct; identical to SEQ ID NO: 224
  source 1..100: mol_type = other RNA
  modified_base 1: mod_base = OTHER; note = 2'-O-methyl modified nucleotide with phosphorothioate linkage
  modified_base 2: mod_base = OTHER; note = 2'-O-methyl modified nucleotide with phosphorothioate linkage
  modified_base 3: mod_base = OTHER; note = 2'-O-methyl modified nucleotide with phosphorothioate linkage
  modified_base 21: mod_base = OTHER; note = 2'-O-methyl modified nucleotide
  modified_base 28: mod_base = OTHER; note = 2'-O-methyl modified nucleotide
  modified_base 29: mod_base = OTHER; note = 2'-O-methyl modified nucleotide
  modified_base 30: mod_base = OTHER; note = 2'-O-methyl modified nucleotide
  modified_base 31: mod_base = OTHER; note = 2'-O-methyl modified nucleotide
  modified_base 32: mod_base = OTHER; note = 2'-O-methyl modified nucleotide
  modified_base 34: mod_base = OTHER; note = 2'-O-methyl modified nucleotide
  modified_base 35: mod_base = OTHER; note = 2'-O-methyl modified nucleotide
  modified_base 36: mod_base = OTHER; note = 2'-O-methyl modified nucleotide
  modified_base 37: mod_base = OTHER; note = 2'-O-methyl modified nucleotide
  modified_base 38: mod_base = OTHER; note = 2'-O-methyl modified nucleotide
  modified_base 39: mod_base = OTHER; note = 2'-O-methyl modified nucleotide
  modified_base 40: mod_base = OTHER; note = 2'-O-methyl modified nucleotide
  modified_base 41: mod_base = OTHER; note = 2'-O-methyl modified nucleotide
  modified_base 42: mod_base = OTHER; note = 2'-O-methyl modified nucleotide
  modified_base 46: mod_base = OTHER; note = 2'-O-methyl modified nucleotide
  modified_base 48: mod_base = OTHER; note = 2'-O-methyl modified nucleotide
  modified_base 50: mod_base = OTHER; note = 2'-O-methyl modified nucleotide
  modified_base 52: mod_base = OTHER; note = 2'-O-methyl modified nucleotide
  modified_base 53: mod_base = OTHER; note = 2'-O-methyl modified nucleotide
  modified_base 54: mod_base = OTHER; note = 2'-O-methyl modified nucleotide
  modified_base 55: mod_base = OTHER; note = 2'-O-methyl modified nucleotide
  modified_base 56: mod_base = OTHER; note = 2'-O-methyl modified nucleotide
  modified_base 57: mod_base = OTHER; note = 2'-O-methyl modified nucleotide
  modified_base 60: mod_base = OTHER; note = 2'-O-methyl modified nucleotide
  modified_base 61: mod_base = OTHER; note = 2'-O-methyl modified nucleotide
  modified_base 66: mod_base = OTHER; note = 2'-O-methyl modified nucleotide
  modified_base 67: mod_base = OTHER; note = 2'-O-methyl modified nucleotide
  modified_base 70: mod_base = OTHER; note = 2'-O-methyl modified nucleotide
  modified_base 71: mod_base = OTHER; note = 2'-O-methyl modified nucleotide
  modified_base 72: mod_base = OTHER; note = 2'-O-methyl modified nucleotide
  modified_base 74: mod_base = OTHER; note = 2'-O-methyl modified nucleotide
  modified_base 75: mod_base = OTHER; note = 2'-O-methyl modified nucleotide
  modified_base 76: mod_base = OTHER; note = 2'-O-methyl modified nucleotide
  modified_base 77: mod_base = OTHER; note = 2'-O-methyl modified nucleotide
  modified_base 78: mod_base = OTHER; note = 2'-O-methyl modified nucleotide
  modified_base 79: mod_base = OTHER; note = 2'-O-methyl modified nucleotide
  modified_base 80: mod_base = OTHER; note = 2'-O-methyl modified nucleotide
  modified_base 81: mod_base = OTHER; note = 2'-O-methyl modified nucleotide
  modified_base 83: mod_base = OTHER; note = 2'-O-methyl modified nucleotide
  modified_base 84: mod_base = OTHER; note = 2'-O-methyl modified nucleotide
  modified_base 85: mod_base = OTHER; note = 2'-O-methyl modified nucleotide
  modified_base 86: mod_base = OTHER; note = 2'-O-methyl modified nucleotide
  modified_base 87: mod_base = OTHER; note = 2'-O-methyl modified nucleotide
  modified_base 88: mod_base = OTHER; note = 2'-O-methyl modified nucleotide
  modified_base 89: mod_base = OTHER; note = 2'-O-methyl modified nucleotide
  modified_base 90: mod_base = OTHER; note = 2'-O-methyl modified nucleotide
  modified_base 91: mod_base = OTHER; note = 2'-O-methyl modified nucleotide
  modified_base 92: mod_base = OTHER; note = 2'-O-methyl modified nucleotide
  modified_base 93: mod_base = OTHER; note = 2'-O-methyl modified nucleotide
  modified_base 94: mod_base = OTHER; note = 2'-O-methyl modified nucleotide
  modified_base 95: mod_base = OTHER; note = 2'-O-methyl modified nucleotide
  modified_base 96: mod_base = OTHER; note = 2'-O-methyl modified nucleotide
  modified_base 97: mod_base = OTHER; note = 2'-O-methyl modified nucleotide with phosphorothioate linkage
  modified_base 98: mod_base = OTHER; note = 2'-O-methyl modified nucleotide with phosphorothioate linkage
  modified_base 99: mod_base = OTHER; note = 2'-O-methyl modified nucleotide with phosphorothioate linkage
  modified_base 100: mod_base = OTHER; note = 2'-O-methyl modified nucleotide

SEQ ID NO: 340 - RNA, 100 nt, synthetic construct; identical to SEQ ID NO: 225
  source 1..100: mol_type = other RNA
  modified_base 1: mod_base = OTHER; note = 2'-O-methyl modified nucleotide with phosphorothioate linkage
  modified_base 2: mod_base = OTHER; note = 2'-O-methyl modified nucleotide with phosphorothioate linkage
  modified_base 3: mod_base = OTHER; note = 2'-O-methyl modified nucleotide with phosphorothioate linkage
  modified_base 97: mod_base = OTHER; note = Nucleotide with phosphorothioate linkage
  modified_base 98: mod_base = OTHER; note = 2'-O-methyl modified nucleotide with phosphorothioate linkage
  modified_base 99: mod_base = OTHER; note = 2'-O-methyl modified nucleotide with phosphorothioate linkage
  modified_base 100: mod_base = OTHER; note = 2'-O-methyl modified nucleotide

SEQ ID NO: 341 - RNA, 100 nt, synthetic construct; identical to SEQ ID NO: 225
  source 1..100: mol_type = other RNA
  modified_base 1: mod_base = OTHER; note = 2'-O-methyl modified nucleotide with phosphorothioate linkage
  modified_base 2: mod_base = OTHER; note = 2'-O-methyl modified nucleotide with phosphorothioate linkage
  modified_base 3: mod_base = OTHER; note = 2'-O-methyl modified nucleotide with phosphorothioate linkage
  modified_base 21: mod_base = OTHER; note = 2'-O-methyl modified nucleotide
  modified_base 28: mod_base = OTHER; note = 2'-O-methyl modified nucleotide
  modified_base 29: mod_base = OTHER; note = 2'-O-methyl modified nucleotide
  modified_base 30: mod_base = OTHER; note = 2'-O-methyl modified nucleotide
  modified_base 31: mod_base = OTHER; note = 2'-O-methyl modified nucleotide
  modified_base 32: mod_base = OTHER; note = 2'-O-methyl modified nucleotide
  modified_base 34: mod_base = OTHER; note = 2'-O-methyl modified nucleotide
  modified_base 35: mod_base = OTHER; note = 2'-O-methyl modified nucleotide
  modified_base 36: mod_base = OTHER; note = 2'-O-methyl modified nucleotide
  modified_base 37: mod_base = OTHER; note = 2'-O-methyl modified nucleotide
  modified_base 38: mod_base = OTHER; note = 2'-O-methyl modified nucleotide
  modified_base 39: mod_base = OTHER; note = 2'-O-methyl modified nucleotide
  modified_base 40: mod_base = OTHER; note = 2'-O-methyl modified nucleotide
  modified_base 41: mod_base = OTHER; note = 2'-O-methyl modified nucleotide
  modified_base 42: mod_base = OTHER; note = 2'-O-methyl modified nucleotide
  modified_base 46: mod_base = OTHER; note = 2'-O-methyl modified nucleotide
  modified_base 48: mod_base = OTHER; note = 2'-O-methyl modified nucleotide
  modified_base 50: mod_base = OTHER; note = 2'-O-methyl modified nucleotide
  modified_base 52: mod_base = OTHER; note = 2'-O-methyl modified nucleotide
  modified_base 53: mod_base = OTHER; note = 2'-O-methyl modified nucleotide
  modified_base 54: mod_base = OTHER; note = 2'-O-methyl modified nucleotide
  modified_base 55: mod_base = OTHER; note = 2'-O-methyl modified nucleotide
  modified_base 56: mod_base = OTHER; note = 2'-O-methyl modified nucleotide
  modified_base 57: mod_base = OTHER; note = 2'-O-methyl modified nucleotide
  modified_base 60: mod_base = OTHER; note = 2'-O-methyl modified nucleotide
  modified_base 61: mod_base = OTHER; note = 2'-O-methyl modified nucleotide
  modified_base 66: mod_base = OTHER; note = 2'-O-methyl modified nucleotide
  modified_base 67: mod_base = OTHER; note = 2'-O-methyl modified nucleotide
  modified_base 70: mod_base = OTHER; note = 2'-O-methyl modified nucleotide
  modified_base 71: mod_base = OTHER; note = 2'-O-methyl modified nucleotide
  modified_base 72: mod_base = OTHER; note = 2'-O-methyl modified nucleotide
  modified_base 74: mod_base = OTHER; note = 2'-O-methyl modified nucleotide
  modified_base 75: mod_base = OTHER; note = 2'-O-methyl modified nucleotide
  modified_base 76: mod_base = OTHER; note = 2'-O-methyl modified nucleotide
  modified_base 77: mod_base = OTHER; note = 2'-O-methyl modified nucleotide
  modified_base 78: mod_base = OTHER; note = 2'-O-methyl modified nucleotide
  modified_base 79: mod_base = OTHER; note = 2'-O-methyl modified nucleotide
  modified_base 80: mod_base = OTHER; note = 2'-O-methyl modified nucleotide
  modified_base 81: mod_base = OTHER; note = 2'-O-methyl modified nucleotide
  modified_base 83: mod_base = OTHER; note = 2'-O-methyl modified nucleotide
  modified_base 84: mod_base = OTHER; note = 2'-O-methyl modified nucleotide
  modified_base 85: mod_base = OTHER; note = 2'-O-methyl modified nucleotide
  modified_base 86: mod_base = OTHER; note = 2'-O-methyl modified nucleotide
  modified_base 87: mod_base = OTHER; note = 2'-O-methyl modified nucleotide
  modified_base 88: mod_base = OTHER; note = 2'-O-methyl modified nucleotide
  modified_base 89: mod_base = OTHER; note = 2'-O-methyl modified nucleotide
  modified_base 90: mod_base = OTHER; note = 2'-O-methyl modified nucleotide
  modified_base 91: mod_base = OTHER; note = 2'-O-methyl modified nucleotide
  modified_base 92: mod_base = OTHER; note = 2'-O-methyl modified nucleotide
  modified_base 93: mod_base = OTHER; note = 2'-O-methyl modified nucleotide
  modified_base 94: mod_base = OTHER; note = 2'-O-methyl modified nucleotide
  modified_base 95: mod_base = OTHER; note = 2'-O-methyl modified nucleotide
  modified_base 96: mod_base = OTHER; note = 2'-O-methyl modified nucleotide
  modified_base 97: mod_base = OTHER; note = 2'-O-methyl modified nucleotide with phosphorothioate linkage
  modified_base 98: mod_base = OTHER; note = 2'-O-methyl modified nucleotide with phosphorothioate linkage
  modified_base 99: mod_base = OTHER; note = 2'-O-methyl modified nucleotide with phosphorothioate linkage
  modified_base 100: mod_base = OTHER; note = 2'-O-methyl modified nucleotide

SEQ ID NO: 342 - RNA, 100 nt, synthetic construct; identical to SEQ ID NO: 226
  source 1..100: mol_type = other RNA
  modified_base 1: mod_base = OTHER; note = 2'-O-methyl modified nucleotide with phosphorothioate linkage
  modified_base 2: mod_base = OTHER; note = 2'-O-methyl modified nucleotide with phosphorothioate linkage
  modified_base 3: mod_base = OTHER; note = 2'-O-methyl modified nucleotide with phosphorothioate linkage
  modified_base 97: mod_base = OTHER; note = Nucleotide with phosphorothioate linkage
  modified_base 98: mod_base = OTHER; note = 2'-O-methyl modified nucleotide with phosphorothioate linkage
  modified_base 99: mod_base = OTHER; note = 2'-O-methyl modified nucleotide with phosphorothioate linkage
  modified_base 100: mod_base = OTHER; note = 2'-O-methyl modified nucleotide

SEQ ID NO: 343 - RNA, 100 nt, synthetic construct; identical to SEQ ID NO: 227
  source 1..100: mol_type = other RNA
  modified_base 1: mod_base = OTHER; note = 2'-O-methyl modified nucleotide with phosphorothioate linkage
  modified_base 2: mod_base = OTHER; note = 2'-O-methyl modified nucleotide with phosphorothioate linkage
  modified_base 3: mod_base = OTHER; note = 2'-O-methyl modified nucleotide with phosphorothioate linkage
  modified_base 97: mod_base = OTHER; note = Nucleotide with phosphorothioate linkage
  modified_base 98: mod_base = OTHER; note = 2'-O-methyl modified nucleotide with phosphorothioate linkage
  modified_base 99: mod_base = OTHER; note = 2'-O-methyl modified nucleotide with phosphorothioate linkage
  modified_base 100: mod_base = OTHER; note = 2'-O-methyl modified nucleotide

SEQ ID NO: 344 - RNA, 100 nt, synthetic construct; identical to SEQ ID NO: 227
  source 1..100: mol_type = other RNA
  modified_base 1: mod_base = OTHER; note = 2'-O-methyl modified nucleotide with phosphorothioate linkage
  modified_base 2: mod_base = OTHER; note = 2'-O-methyl modified nucleotide with phosphorothioate linkage
  modified_base 3: mod_base = OTHER; note = 2'-O-methyl modified nucleotide with phosphorothioate linkage
  modified_base 21: mod_base = OTHER; note = 2'-O-methyl modified nucleotide
  modified_base 28: mod_base = OTHER; note = 2'-O-methyl modified nucleotide
  modified_base 29: mod_base = OTHER; note = 2'-O-methyl modified nucleotide
  modified_base 30: mod_base = OTHER; note = 2'-O-methyl modified nucleotide
  modified_base 31: mod_base = OTHER; note = 2'-O-methyl modified nucleotide
  modified_base 32: mod_base = OTHER; note = 2'-O-methyl modified nucleotide
  modified_base 34: mod_base = OTHER; note = 2'-O-methyl modified nucleotide
  modified_base 35: mod_base = OTHER; note = 2'-O-methyl modified nucleotide
  modified_base 36: mod_base = OTHER; note = 2'-O-methyl modified nucleotide
  modified_base 37: mod_base = OTHER; note = 2'-O-methyl modified nucleotide
  modified_base 38: mod_base = OTHER; note = 2'-O-methyl modified nucleotide
  modified_base 39: mod_base = OTHER; note = 2'-O-methyl modified nucleotide
  modified_base 40: mod_base = OTHER; note = 2'-O-methyl modified nucleotide
  modified_base 41: mod_base = OTHER; note = 2'-O-methyl modified nucleotide
  modified_base 42: mod_base = OTHER; note = 2'-O-methyl modified nucleotide
  modified_base 46: mod_base = OTHER; note = 2'-O-methyl modified nucleotide
  modified_base 48: mod_base = OTHER; note = 2'-O-methyl modified nucleotide
  modified_base 50: mod_base = OTHER; note = 2'-O-methyl modified nucleotide
  modified_base 52: mod_base = OTHER; note = 2'-O-methyl modified nucleotide
  modified_base 53: mod_base = OTHER; note = 2'-O-methyl modified nucleotide
  modified_base 54: mod_base = OTHER; note = 2'-O-methyl modified nucleotide
  modified_base 55: mod_base = OTHER; note = 2'-O-methyl modified nucleotide
  modified_base 56: mod_base = OTHER; note = 2'-O-methyl modified nucleotide
  modified_base 57: mod_base = OTHER; note = 2'-O-methyl modified nucleotide
  modified_base 60: mod_base = OTHER; note = 2'-O-methyl modified nucleotide
  modified_base 61: mod_base = OTHER; note = 2'-O-methyl modified nucleotide
  modified_base 66: mod_base = OTHER; note = 2'-O-methyl modified nucleotide
  modified_base 67: mod_base = OTHER; note = 2'-O-methyl modified nucleotide
  modified_base 70: mod_base = OTHER; note = 2'-O-methyl modified nucleotide
  modified_base 71: mod_base = OTHER; note = 2'-O-methyl modified nucleotide
  modified_base 72: mod_base = OTHER; note = 2'-O-methyl modified nucleotide
  modified_base 74: mod_base = OTHER; note = 2'-O-methyl modified nucleotide
  modified_base 75: mod_base = OTHER; note = 2'-O-methyl modified nucleotide
  modified_base 76: mod_base = OTHER; note = 2'-O-methyl modified nucleotide
  modified_base 77: mod_base = OTHER; note = 2'-O-methyl modified nucleotide
  modified_base 78: mod_base = OTHER; note = 2'-O-methyl modified nucleotide
  modified_base 79: mod_base = OTHER; note = 2'-O-methyl modified nucleotide
  modified_base 80: mod_base = OTHER; note = 2'-O-methyl modified nucleotide
  modified_base 81: mod_base = OTHER; note = 2'-O-methyl modified nucleotide
  modified_base 83: mod_base = OTHER; note = 2'-O-methyl modified nucleotide
  modified_base 84: mod_base = OTHER; note = 2'-O-methyl modified nucleotide
  modified_base 85: mod_base = OTHER; note = 2'-O-methyl modified nucleotide
  modified_base 86: mod_base = OTHER; note = 2'-O-methyl modified nucleotide
  modified_base 87: mod_base = OTHER; note = 2'-O-methyl modified nucleotide
  modified_base 88: mod_base = OTHER; note = 2'-O-methyl modified nucleotide
  modified_base 89: mod_base = OTHER; note = 2'-O-methyl modified nucleotide
  modified_base 90: mod_base = OTHER; note = 2'-O-methyl modified nucleotide
  modified_base 91: mod_base = OTHER; note = 2'-O-methyl modified nucleotide
  modified_base 92: mod_base = OTHER; note = 2'-O-methyl modified nucleotide
  modified_base 93: mod_base = OTHER; note = 2'-O-methyl modified nucleotide
  modified_base 94: mod_base = OTHER; note = 2'-O-methyl modified nucleotide
  modified_base 95: mod_base = OTHER; note = 2'-O-methyl modified nucleotide
  modified_base 96: mod_base = OTHER; note = 2'-O-methyl modified nucleotide
  modified_base 97: mod_base = OTHER; note = 2'-O-methyl modified nucleotide with phosphorothioate linkage
  modified_base 98: mod_base = OTHER; note = 2'-O-methyl modified nucleotide with phosphorothioate linkage
  modified_base 99: mod_base = OTHER; note = 2'-O-methyl modified nucleotide with phosphorothioate linkage
  modified_base 100: mod_base = OTHER; note = 2'-O-methyl modified nucleotide

SEQ ID NO: 345 - RNA, 100 nt, synthetic construct; identical to SEQ ID NO: 194
  source 1..100: mol_type = other RNA
  modified_base 1: mod_base = OTHER; note = 2'-O-methyl modified nucleotide with phosphorothioate linkage
  modified_base 2: mod_base = OTHER; note = 2'-O-methyl modified nucleotide with phosphorothioate linkage
  modified_base 3: mod_base = OTHER; note = 2'-O-methyl modified nucleotide with phosphorothioate linkage
  modified_base 21: mod_base = OTHER; note = 2'-O-methyl modified nucleotide
  modified_base 28: mod_base = OTHER; note = 2'-O-methyl modified nucleotide
  modified_base 29: mod_base = OTHER; note = 2'-O-methyl modified nucleotide
  modified_base 30: mod_base = OTHER; note = 2'-O-methyl modified nucleotide
  modified_base 31: mod_base = OTHER; note = 2'-O-methyl modified nucleotide
  modified_base 32: mod_base = OTHER; note = 2'-O-methyl modified nucleotide
  modified_base 34: mod_base = OTHER; note = 2'-O-methyl modified nucleotide
  modified_base 35: mod_base = OTHER; note = 2'-O-methyl modified nucleotide
  modified_base 36: mod_base = OTHER; note = 2'-O-methyl modified nucleotide
  modified_base 37: mod_base = OTHER; note = 2'-O-methyl modified nucleotide
  modified_base 38: mod_base = OTHER; note = 2'-O-methyl modified nucleotide
  modified_base 39: mod_base = OTHER; note = 2'-O-methyl modified nucleotide
  modified_base 40: mod_base = OTHER; note = 2'-O-methyl modified nucleotide
  modified_base 41: mod_base = OTHER; note = 2'-O-methyl modified nucleotide
  modified_base 42: mod_base = OTHER; note = 2'-O-methyl modified nucleotide
  modified_base 46: mod_base = OTHER; note = 2'-O-methyl modified nucleotide
  modified_base 48: mod_base = OTHER; note = 2'-O-methyl modified nucleotide
  modified_base 50: mod_base = OTHER; note = 2'-O-methyl modified nucleotide
  modified_base 52: mod_base = OTHER; note = 2'-O-methyl modified nucleotide
  modified_base 53: mod_base = OTHER; note = 2'-O-methyl modified nucleotide
  modified_base 54: mod_base = OTHER; note = 2'-O-methyl modified nucleotide
  modified_base 55: mod_base = OTHER; note = 2'-O-methyl modified nucleotide
  modified_base 56: mod_base = OTHER; note = 2'-O-methyl modified nucleotide
  modified_base 57: mod_base = OTHER; note = 2'-O-methyl modified nucleotide
  modified_base 60: mod_base = OTHER; note = 2'-O-methyl modified nucleotide
  modified_base 61: mod_base = OTHER; note = 2'-O-methyl modified nucleotide
  modified_base 66: mod_base = OTHER; note = 2'-O-methyl modified nucleotide
  modified_base 67: mod_base = OTHER; note = 2'-O-methyl modified nucleotide
  modified_base 70: mod_base = OTHER; note = 2'-O-methyl modified nucleotide
  modified_base 71: mod_base = OTHER; note = 2'-O-methyl modified nucleotide
  modified_base 72: mod_base = OTHER; note = 2'-O-methyl modified nucleotide
  modified_base 74: mod_base = OTHER; note = 2'-O-methyl modified nucleotide
  modified_base 75: mod_base = OTHER; note = 2'-O-methyl modified nucleotide
  modified_base 76: mod_base = OTHER; note = 2'-O-methyl modified nucleotide
  modified_base 77: mod_base = OTHER; note = 2'-O-methyl modified nucleotide
  modified_base 78: mod_base = OTHER; note = 2'-O-methyl modified nucleotide
  modified_base 79: mod_base = OTHER; note = 2'-O-methyl modified nucleotide
  modified_base 80: mod_base = OTHER; note = 2'-O-methyl modified nucleotide
  modified_base 81: mod_base = OTHER; note = 2'-O-methyl modified nucleotide
  modified_base 83: mod_base = OTHER; note = 2'-O-methyl modified nucleotide
  modified_base 84: mod_base = OTHER; note = 2'-O-methyl modified nucleotide
  modified_base 85: mod_base = OTHER; note = 2'-O-methyl modified nucleotide
  modified_base 86: mod_base = OTHER; note = 2'-O-methyl modified nucleotide
  modified_base 87: mod_base = OTHER; note = 2'-O-methyl modified nucleotide
  modified_base 88: mod_base = OTHER; note = 2'-O-methyl modified nucleotide
  modified_base 89: mod_base = OTHER; note = 2'-O-methyl modified nucleotide
  modified_base 90: mod_base = OTHER; note = 2'-O-methyl modified nucleotide
  modified_base 91: mod_base = OTHER; note = 2'-O-methyl modified nucleotide
  modified_base 92: mod_base = OTHER; note = 2'-O-methyl modified nucleotide
  modified_base 93: mod_base = OTHER; note = 2'-O-methyl modified nucleotide
  modified_base 94: mod_base = OTHER; note = 2'-O-methyl modified nucleotide
  modified_base 95: mod_base = OTHER; note = 2'-O-methyl modified nucleotide
  modified_base 96: mod_base = OTHER; note = 2'-O-methyl modified nucleotide
  modified_base 97: mod_base = OTHER; note = 2'-O-methyl modified nucleotide with phosphorothioate linkage
  modified_base 98: mod_base = OTHER; note = 2'-O-methyl modified nucleotide with phosphorothioate linkage
  modified_base 99: mod_base = OTHER; note = 2'-O-methyl modified nucleotide with phosphorothioate linkage
  modified_base 100: mod_base = OTHER; note = 2'-O-methyl modified nucleotide

SEQ ID NO: 346 - RNA, 100 nt, synthetic construct; identical to SEQ ID NO: 228
  source 1..100: mol_type = other RNA
  modified_base 1: mod_base = OTHER; note = 2'-O-methyl modified nucleotide with phosphorothioate linkage
  modified_base 2: mod_base = OTHER; note = 2'-O-methyl modified nucleotide with phosphorothioate linkage
  modified_base 3: mod_base = OTHER; note = 2'-O-methyl modified nucleotide with phosphorothioate linkage
  modified_base 97: mod_base = OTHER; note = Nucleotide with phosphorothioate linkage
  modified_base 98: mod_base = OTHER; note = 2'-O-methyl modified nucleotide with phosphorothioate linkage
  modified_base 99: mod_base = OTHER; note = 2'-O-methyl modified nucleotide with phosphorothioate linkage
  modified_base 100: mod_base = OTHER; note = 2'-O-methyl modified nucleotide

SEQ ID NO: 347 - RNA, 100 nt, synthetic construct; identical to SEQ ID NO: 228
  source 1..100: mol_type = other RNA
  modified_base 1: mod_base = OTHER; note = 2'-O-methyl modified nucleotide with phosphorothioate linkage
  modified_base 2: mod_base = OTHER; note = 2'-O-methyl modified nucleotide with phosphorothioate linkage
  modified_base 3: mod_base = OTHER; note = 2'-O-methyl modified nucleotide with phosphorothioate linkage
  modified_base 21: mod_base = OTHER; note = 2'-O-methyl modified nucleotide
  modified_base 28: mod_base = OTHER; note = 2'-O-methyl modified nucleotide
  modified_base 29: mod_base = OTHER; note = 2'-O-methyl modified nucleotide
  modified_base 30: mod_base = OTHER; note = 2'-O-methyl modified nucleotide
  modified_base 31: mod_base = OTHER; note = 2'-O-methyl modified nucleotide
  modified_base 32: mod_base = OTHER; note = 2'-O-methyl modified nucleotide
  modified_base 34: mod_base = OTHER; note = 2'-O-methyl modified nucleotide
  modified_base 35: mod_base = OTHER; note = 2'-O-methyl modified nucleotide
  modified_base 36: mod_base = OTHER; note = 2'-O-methyl modified nucleotide
  modified_base 37: mod_base = OTHER; note = 2'-O-methyl modified nucleotide
  modified_base 38: mod_base = OTHER; note = 2'-O-methyl modified nucleotide
  modified_base 39: mod_base = OTHER; note = 2'-O-methyl modified nucleotide
  modified_base 40: mod_base = OTHER; note = 2'-O-methyl modified nucleotide
  modified_base 41: mod_base = OTHER; note = 2'-O-methyl modified nucleotide
  modified_base 42: mod_base = OTHER; note = 2'-O-methyl modified nucleotide
  modified_base 46: mod_base = OTHER; note = 2'-O-methyl modified nucleotide
  modified_base 48: mod_base = OTHER; note = 2'-O-methyl modified nucleotide
  modified_base 50: mod_base = OTHER; note = 2'-O-methyl modified nucleotide
  modified_base 52: mod_base = OTHER; note = 2'-O-methyl modified nucleotide
  modified_base 53: mod_base = OTHER; note = 2'-O-methyl modified nucleotide
  modified_base 54: mod_base = OTHER; note = 2'-O-methyl modified nucleotide
  modified_base 55: mod_base = OTHER; note = 2'-O-methyl modified nucleotide
  modified_base 56: mod_base = OTHER; note = 2'-O-methyl modified nucleotide
  modified_base 57: mod_base = OTHER; note = 2'-O-methyl modified nucleotide
  modified_base 60: mod_base = OTHER; note = 2'-O-methyl modified nucleotide
  modified_base 61: mod_base = OTHER; note = 2'-O-methyl modified nucleotide
  modified_base 66: mod_base = OTHER; note = 2'-O-methyl modified nucleotide
  modified_base 67: mod_base = OTHER; note = 2'-O-methyl modified nucleotide
  modified_base 70: mod_base = OTHER; note = 2'-O-methyl modified nucleotide
  modified_base 71: mod_base = OTHER; note = 2'-O-methyl modified nucleotide
  modified_base 72: mod_base = OTHER; note = 2'-O-methyl modified nucleotide
  modified_base 74: mod_base = OTHER; note = 2'-O-methyl modified nucleotide
  modified_base 75: mod_base = OTHER; note = 2'-O-methyl modified nucleotide
  modified_base 76: mod_base = OTHER; note = 2'-O-methyl modified nucleotide
  modified_base 77: mod_base = OTHER; note = 2'-O-methyl modified nucleotide
  modified_base 78: mod_base = OTHER; note = 2'-O-methyl modified nucleotide
  modified_base 79: mod_base = OTHER; note = 2'-O-methyl modified nucleotide
  modified_base 80: mod_base = OTHER; note = 2'-O-methyl modified nucleotide
  modified_base 81: mod_base = OTHER; note = 2'-O-methyl modified nucleotide
  modified_base 83: mod_base = OTHER; note = 2'-O-methyl modified nucleotide
  modified_base 84: mod_base = OTHER; note = 2'-O-methyl modified nucleotide
  modified_base 85: mod_base = OTHER; note = 2'-O-methyl modified nucleotide
  modified_base 86: mod_base = OTHER; note = 2'-O-methyl modified nucleotide
  modified_base 87: mod_base = OTHER; note = 2'-O-methyl modified nucleotide
  modified_base 88: mod_base = OTHER; note = 2'-O-methyl modified nucleotide
  modified_base 89: mod_base = OTHER; note = 2'-O-methyl modified nucleotide
  modified_base 90: mod_base = OTHER; note = 2'-O-methyl modified nucleotide
  modified_base 91: mod_base = OTHER; note = 2'-O-methyl modified nucleotide
  modified_base 92: mod_base = OTHER; note = 2'-O-methyl modified nucleotide
  modified_base 93: mod_base = OTHER; note = 2'-O-methyl modified nucleotide
  modified_base 94: mod_base = OTHER; note = 2'-O-methyl modified nucleotide
  modified_base 95: mod_base = OTHER; note = 2'-O-methyl modified nucleotide
  modified_base 96: mod_base = OTHER; note = 2'-O-methyl modified nucleotide
  modified_base 97: mod_base = OTHER; note = 2'-O-methyl modified nucleotide with phosphorothioate linkage
  modified_base 98: mod_base = OTHER; note = 2'-O-methyl modified nucleotide with phosphorothioate linkage
  modified_base 99: mod_base = OTHER; note = 2'-O-methyl modified nucleotide with phosphorothioate linkage
  modified_base 100: mod_base = OTHER; note = 2'-O-methyl modified nucleotide

SEQ ID NO: 348 - RNA, 100 nt, synthetic construct; identical to SEQ ID NO: 229
  source 1..100: mol_type = other RNA
  modified_base 1: mod_base = OTHER; note = 2'-O-methyl modified nucleotide with phosphorothioate linkage
  modified_base 2: mod_base = OTHER; note = 2'-O-methyl modified nucleotide with phosphorothioate linkage
  modified_base 3: mod_base = OTHER; note = 2'-O-methyl modified nucleotide with phosphorothioate linkage
  modified_base 97: mod_base = OTHER; note = Nucleotide with phosphorothioate linkage
  modified_base 98: mod_base = OTHER; note = 2'-O-methyl modified nucleotide with phosphorothioate linkage
  modified_base 99: mod_base = OTHER; note = 2'-O-methyl modified nucleotide with phosphorothioate linkage
  modified_base 100: mod_base = OTHER; note = 2'-O-methyl modified nucleotide

SEQ ID NO: 349 - RNA, 100 nt, synthetic construct; identical to SEQ ID NO: 230
  source 1..100: mol_type = other RNA
  modified_base 1: mod_base = OTHER; note = 2'-O-methyl modified nucleotide with phosphorothioate linkage
  modified_base 2: mod_base = OTHER; note = 2'-O-methyl modified nucleotide with phosphorothioate linkage
  modified_base 3: mod_base = OTHER; note = 2'-O-methyl modified nucleotide with phosphorothioate linkage
  modified_base 97: mod_base = OTHER; note = Nucleotide with phosphorothioate linkage
  modified_base 98: mod_base = OTHER; note = 2'-O-methyl modified nucleotide with phosphorothioate linkage
  modified_base 99: mod_base = OTHER; note = 2'-O-methyl modified nucleotide with phosphorothioate linkage
  modified_base 100: mod_base = OTHER; note = 2'-O-methyl modified nucleotide

SEQ ID NO: 350 - RNA, 100 nt, synthetic construct; identical to SEQ ID NO: 231
  source 1..100: mol_type = other RNA
  modified_base 1: mod_base = OTHER; note = 2'-O-methyl modified nucleotide with phosphorothioate linkage
  modified_base 2: mod_base = OTHER; note = 2'-O-methyl modified nucleotide with phosphorothioate linkage
  modified_base 3: mod_base = OTHER; note = 2'-O-methyl modified nucleotide with phosphorothioate linkage
  modified_base 97: mod_base = OTHER; note = Nucleotide with phosphorothioate linkage
  modified_base 98: mod_base = OTHER; note = 2'-O-methyl modified nucleotide with phosphorothioate linkage
  modified_base 99: mod_base = OTHER; note = 2'-O-methyl modified nucleotide with phosphorothioate linkage
  modified_base 100: mod_base = OTHER; note = 2'-O-methyl modified nucleotide

SEQ ID NO: 351 - RNA, 100 nt, synthetic construct; identical to SEQ ID NO: 232
  source 1..100: mol_type = other RNA
  modified_base 1: mod_base = OTHER; note = 2'-O-methyl modified nucleotide with phosphorothioate linkage
  modified_base 2: mod_base = OTHER; note = 2'-O-methyl modified nucleotide with phosphorothioate linkage
  modified_base 3: mod_base = OTHER; note = 2'-O-methyl modified nucleotide with phosphorothioate linkage
  modified_base 97: mod_base = OTHER; note = Nucleotide with phosphorothioate linkage
  modified_base 98: mod_base = OTHER; note = 2'-O-methyl modified nucleotide with phosphorothioate linkage
  modified_base 99: mod_base = OTHER; note = 2'-O-methyl modified nucleotide with phosphorothioate linkage
  modified_base 100: mod_base = OTHER; note = 2'-O-methyl modified nucleotide

SEQ ID NO: 352 - RNA, 100 nt, synthetic construct; identical to SEQ ID NO: 232
  source 1..100: mol_type = other RNA
  modified_base 1: mod_base = OTHER; note = 2'-O-methyl modified nucleotide with phosphorothioate linkage
  modified_base 2: mod_base = OTHER; note = 2'-O-methyl modified nucleotide with phosphorothioate linkage
  modified_base 3: mod_base = OTHER; note = 2'-O-methyl modified nucleotide with phosphorothioate linkage
  modified_base 21: mod_base = OTHER; note = 2'-O-methyl modified nucleotide
  modified_base 28: mod_base = OTHER; note = 2'-O-methyl modified nucleotide
  modified_base 29: mod_base = OTHER; note = 2'-O-methyl modified nucleotide
  modified_base 30: mod_base = OTHER; note = 2'-O-methyl modified nucleotide
  modified_base 31: mod_base = OTHER; note = 2'-O-methyl modified nucleotide
  modified_base 32: mod_base = OTHER; note = 2'-O-methyl modified nucleotide
  modified_base 34: mod_base = OTHER; note = 2'-O-methyl modified nucleotide
  modified_base 35: mod_base = OTHER; note = 2'-O-methyl modified nucleotide
  modified_base 36: mod_base = OTHER; note = 2'-O-methyl modified nucleotide
  modified_base 37: mod_base = OTHER; note = 2'-O-methyl modified nucleotide
  modified_base 38: mod_base = OTHER; note = 2'-O-methyl modified nucleotide
  modified_base 39: mod_base = OTHER; note = 2'-O-methyl modified nucleotide
  modified_base 40: mod_base = OTHER; note = 2'-O-methyl modified nucleotide
  modified_base 41: mod_base = OTHER; note = 2'-O-methyl modified nucleotide
  modified_base 42: mod_base = OTHER; note = 2'-O-methyl modified nucleotide
  modified_base 46: mod_base = OTHER; note = 2'-O-methyl modified nucleotide
  modified_base 48: mod_base = OTHER; note = 2'-O-methyl modified nucleotide
  modified_base 50: mod_base = OTHER; note = 2'-O-methyl modified nucleotide
  modified_base 52: mod_base = OTHER; note = 2'-O-methyl modified nucleotide
  modified_base 53: mod_base = OTHER; note = 2'-O-methyl modified nucleotide
  modified_base 54: mod_base = OTHER; note = 2'-O-methyl modified nucleotide
  modified_base 55: mod_base = OTHER; note = 2'-O-methyl modified nucleotide
  modified_base 56: mod_base = OTHER; note = 2'-O-methyl modified nucleotide
  modified_base 57: mod_base = OTHER; note = 2'-O-methyl modified nucleotide
  modified_base 60: mod_base = OTHER; note = 2'-O-methyl modified nucleotide
  modified_base 61: mod_base = OTHER; note = 2'-O-methyl modified nucleotide
  modified_base 66: mod_base = OTHER; note = 2'-O-methyl modified nucleotide
  modified_base 67: mod_base = OTHER; note = 2'-O-methyl modified nucleotide
  modified_base 70: mod_base = OTHER; note = 2'-O-methyl modified nucleotide
  modified_base 71: mod_base = OTHER; note = 2'-O-methyl modified nucleotide
  modified_base 72: mod_base = OTHER; note = 2'-O-methyl modified nucleotide
  modified_base 74: mod_base = OTHER; note = 2'-O-methyl modified nucleotide
  modified_base 75: mod_base = OTHER; note = 2'-O-methyl modified nucleotide
  modified_base 76: mod_base = OTHER; note = 2'-O-methyl modified nucleotide
  modified_base 77: mod_base = OTHER; note = 2'-O-methyl modified nucleotide
  modified_base 78: mod_base = OTHER; note = 2'-O-methyl modified nucleotide
  modified_base 79: mod_base = OTHER; note = 2'-O-methyl modified nucleotide
  modified_base 80: mod_base = OTHER; note = 2'-O-methyl modified nucleotide
  modified_base 81: mod_base = OTHER; note = 2'-O-methyl modified nucleotide
  modified_base 83: mod_base = OTHER; note = 2'-O-methyl modified nucleotide
  modified_base 84: mod_base = OTHER; note = 2'-O-methyl modified nucleotide
  modified_base 85: mod_base = OTHER; note = 2'-O-methyl modified nucleotide
  modified_base 86: mod_base = OTHER; note = 2'-O-methyl modified nucleotide
  modified_base 87: mod_base = OTHER; note = 2'-O-methyl modified nucleotide
  modified_base 88: mod_base = OTHER; note = 2'-O-methyl modified nucleotide
  modified_base 89: mod_base = OTHER; note = 2'-O-methyl modified nucleotide
  modified_base 90: mod_base = OTHER; note = 2'-O-methyl modified nucleotide
  modified_base 91: mod_base = OTHER; note = 2'-O-methyl modified nucleotide
  modified_base 92: mod_base = OTHER; note = 2'-O-methyl modified nucleotide
  modified_base 93: mod_base = OTHER; note = 2'-O-methyl modified nucleotide
  modified_base 94: mod_base = OTHER; note = 2'-O-methyl modified nucleotide
  modified_base 95: mod_base = OTHER; note = 2'-O-methyl modified nucleotide
  modified_base 96: mod_base = OTHER; note = 2'-O-methyl modified nucleotide
  modified_base 97: mod_base = OTHER; note = 2'-O-methyl modified nucleotide with phosphorothioate linkage
  modified_base 98: mod_base = OTHER; note = 2'-O-methyl modified nucleotide with phosphorothioate linkage
  modified_base 99: mod_base = OTHER; note = 2'-O-methyl modified nucleotide with phosphorothioate linkage
  modified_base 100: mod_base = OTHER; note = 2'-O-methyl modified nucleotide

SEQ ID NO: 353 - RNA, 100 nt, synthetic construct; identical to SEQ ID NO: 233
  source 1..100: mol_type = other RNA
  modified_base 1: mod_base = OTHER; note = 2'-O-methyl modified nucleotide with phosphorothioate linkage
  modified_base 2: mod_base = OTHER; note = 2'-O-methyl modified nucleotide with phosphorothioate linkage
  modified_base 3: mod_base = OTHER; note = 2'-O-methyl modified nucleotide with phosphorothioate linkage
  modified_base 97: mod_base = OTHER; note = Nucleotide with phosphorothioate linkage
  modified_base 98: mod_base = OTHER; note = 2'-O-methyl modified nucleotide with phosphorothioate linkage
  modified_base 99: mod_base = OTHER; note = 2'-O-methyl modified nucleotide with phosphorothioate linkage
  modified_base 100: mod_base = OTHER; note = 2'-O-methyl modified nucleotide

SEQ ID NO: 354 - RNA, 100 nt, synthetic construct; identical to SEQ ID NO: 233
  source 1..100: mol_type = other RNA
  modified_base 1: mod_base = OTHER; note = 2'-O-methyl modified nucleotide with phosphorothioate linkage
  modified_base 2: mod_base = OTHER; note = 2'-O-methyl modified nucleotide with phosphorothioate linkage
  modified_base 3: mod_base = OTHER; note = 2'-O-methyl modified nucleotide with phosphorothioate linkage
  modified_base 21: mod_base = OTHER; note = 2'-O-methyl modified nucleotide
  modified_base 28: mod_base = OTHER; note = 2'-O-methyl modified nucleotide
  modified_base 29: mod_base = OTHER; note = 2'-O-methyl modified nucleotide
  modified_base 30: mod_base = OTHER; note = 2'-O-methyl modified nucleotide
  modified_base 31: mod_base = OTHER; note = 2'-O-methyl modified nucleotide
  modified_base 32: mod_base = OTHER; note = 2'-O-methyl modified nucleotide
  modified_base 34: mod_base = OTHER; note = 2'-O-methyl modified nucleotide
  modified_base 35: mod_base = OTHER; note = 2'-O-methyl modified nucleotide
  modified_base 36: mod_base = OTHER; note = 2'-O-methyl modified nucleotide
  modified_base 37: mod_base = OTHER; note = 2'-O-methyl modified nucleotide
  modified_base 38: mod_base = OTHER; note = 2'-O-methyl modified nucleotide
  modified_base 39: mod_base = OTHER; note = 2'-O-methyl modified nucleotide
  modified_base 40: mod_base = OTHER; note = 2'-O-methyl modified nucleotide
  modified_base 41: mod_base = OTHER; note = 2'-O-methyl modified nucleotide
  modified_base 42: mod_base = OTHER; note = 2'-O-methyl modified nucleotide
  modified_base 46: mod_base = OTHER; note = 2'-O-methyl modified nucleotide
  modified_base 48: mod_base = OTHER; note = 2'-O-methyl modified nucleotide
  modified_base 50: mod_base = OTHER; note = 2'-O-methyl modified nucleotide
  modified_base 52: mod_base = OTHER; note = 2'-O-methyl modified nucleotide
  modified_base 53: mod_base = OTHER; note = 2'-O-methyl modified nucleotide
  modified_base 54: mod_base = OTHER; note = 2'-O-methyl modified nucleotide
  modified_base 55: mod_base = OTHER; note = 2'-O-methyl modified nucleotide
  modified_base 56: mod_base = OTHER; note = 2'-O-methyl modified nucleotide
  modified_base 57: mod_base = OTHER; note = 2'-O-methyl modified nucleotide
  modified_base 60: mod_base = OTHER; note = 2'-O-methyl modified nucleotide
  modified_base 61: mod_base = OTHER; note = 2'-O-methyl modified nucleotide
  modified_base 66: mod_base = OTHER; note = 2'-O-methyl modified nucleotide
  modified_base 67: mod_base = OTHER; note = 2'-O-methyl modified nucleotide
  modified_base 70: mod_base = OTHER; note = 2'-O-methyl modified nucleotide
  modified_base 71: mod_base = OTHER; note = 2'-O-methyl modified nucleotide
  modified_base 72: mod_base = OTHER; note = 2'-O-methyl modified nucleotide
  modified_base 74: mod_base = OTHER; note = 2'-O-methyl modified nucleotide
  modified_base 75: mod_base = OTHER; note = 2'-O-methyl modified nucleotide
  modified_base 76: mod_base = OTHER; note = 2'-O-methyl modified nucleotide
  modified_base 77: mod_base = OTHER; note = 2'-O-methyl modified nucleotide
  modified_base 78: mod_base = OTHER; note = 2'-O-methyl modified nucleotide
  modified_base 79: mod_base = OTHER; note = 2'-O-methyl modified nucleotide
  modified_base 80: mod_base = OTHER; note = 2'-O-methyl modified nucleotide
  modified_base 81: mod_base = OTHER; note = 2'-O-methyl modified nucleotide
  modified_base 83: mod_base = OTHER; note = 2'-O-methyl modified nucleotide
  modified_base 84: mod_base = OTHER; note = 2'-O-methyl modified nucleotide
  modified_base 85: mod_base = OTHER; note = 2'-O-methyl modified nucleotide
  modified_base 86: mod_base = OTHER; note = 2'-O-methyl modified nucleotide
  modified_base 87: mod_base = OTHER; note = 2'-O-methyl modified nucleotide
  modified_base 88: mod_base = OTHER; note = 2'-O-methyl modified nucleotide
  modified_base 89: mod_base = OTHER; note = 2'-O-methyl modified nucleotide
  modified_base 90: mod_base = OTHER; note = 2'-O-methyl modified nucleotide
  modified_base 91: mod_base = OTHER; note = 2'-O-methyl modified nucleotide
  modified_base 92: mod_base = OTHER; note = 2'-O-methyl modified nucleotide
  modified_base 93: mod_base = OTHER; note = 2'-O-methyl modified nucleotide
  modified_base 94: mod_base = OTHER; note = 2'-O-methyl modified nucleotide
  modified_base 95: mod_base = OTHER; note = 2'-O-methyl modified nucleotide
  modified_base 96: mod_base = OTHER; note = 2'-O-methyl modified nucleotide
  modified_base 97: mod_base = OTHER; note = 2'-O-methyl modified nucleotide with phosphorothioate linkage
  modified_base 98: mod_base = OTHER; note = 2'-O-methyl modified nucleotide with phosphorothioate linkage
  modified_base 99: mod_base = OTHER; note = 2'-O-methyl modified nucleotide with phosphorothioate linkage
  modified_base 100: mod_base = OTHER; note = 2'-O-methyl modified nucleotide

SEQ ID NO: 355 - RNA, 100 nt, synthetic construct; identical to SEQ ID NO: 234
  source 1..100: mol_type = other RNA
  modified_base 1: mod_base = OTHER; note = 2'-O-methyl modified nucleotide with phosphorothioate linkage
  modified_base 2: mod_base = OTHER; note = 2'-O-methyl modified nucleotide with phosphorothioate linkage
  modified_base 3: mod_base = OTHER; note = 2'-O-methyl modified nucleotide with phosphorothioate linkage
  modified_base 97: mod_base = OTHER; note = Nucleotide with phosphorothioate linkage
  modified_base 98: mod_base = OTHER; note = 2'-O-methyl modified nucleotide with phosphorothioate linkage
  modified_base 99: mod_base = OTHER; note = 2'-O-methyl modified nucleotide with phosphorothioate linkage
  modified_base 100: mod_base = OTHER; note = 2'-O-methyl modified nucleotide

SEQ ID NO: 356 - RNA, 100 nt, synthetic construct; identical to SEQ ID NO: 234
  source 1..100: mol_type = other RNA
  modified_base 1: mod_base = OTHER; note = 2'-O-methyl modified nucleotide with phosphorothioate linkage
  modified_base 2: mod_base = OTHER; note = 2'-O-methyl modified nucleotide with phosphorothioate linkage
  modified_base 3: mod_base = OTHER; note = 2'-O-methyl modified nucleotide with phosphorothioate linkage
  modified_base 21: mod_base = OTHER; note = 2'-O-methyl modified nucleotide
  modified_base 28: mod_base = OTHER; note = 2'-O-methyl modified nucleotide
  modified_base 29: mod_base = OTHER; note = 2'-O-methyl modified nucleotide
  modified_base 30: mod_base = OTHER; note = 2'-O-methyl modified nucleotide
  modified_base 31: mod_base = OTHER; note = 2'-O-methyl modified nucleotide
  modified_base 32: mod_base = OTHER; note = 2'-O-methyl modified nucleotide
  modified_base 34: mod_base = OTHER; note = 2'-O-methyl modified nucleotide
  modified_base 35: mod_base = OTHER; note = 2'-O-methyl modified nucleotide
  modified_base 36: mod_base = OTHER; note = 2'-O-methyl modified nucleotide
  modified_base 37: mod_base = OTHER; note = 2'-O-methyl modified nucleotide
  modified_base 38: mod_base = OTHER; note = 2'-O-methyl modified nucleotide
  modified_base 39: mod_base = OTHER; note = 2'-O-methyl modified nucleotide
  modified_base 40: mod_base = OTHER; note = 2'-O-methyl modified nucleotide
  modified_base 41: mod_base = OTHER; note = 2'-O-methyl modified nucleotide
  modified_base 42: mod_base = OTHER; note = 2'-O-methyl modified nucleotide
  modified_base 46: mod_base = OTHER; note = 2'-O-methyl modified nucleotide
  modified_base 48: mod_base = OTHER; note = 2'-O-methyl modified nucleotide
  modified_base 50: mod_base = OTHER; note = 2'-O-methyl modified nucleotide
  modified_base 52: mod_base = OTHER; note = 2'-O-methyl modified nucleotide
  modified_base 53: mod_base = OTHER; note = 2'-O-methyl modified nucleotide
  modified_base 54: mod_base = OTHER; note = 2'-O-methyl modified nucleotide
  modified_base 55: mod_base = OTHER; note = 2'-O-methyl modified nucleotide
  modified_base 56: mod_base = OTHER; note = 2'-O-methyl modified nucleotide
  modified_base 57: mod_base = OTHER; note = 2'-O-methyl modified nucleotide
  modified_base 60: mod_base = OTHER; note = 2'-O-methyl modified nucleotide
  modified_base 61: mod_base = OTHER; note = 2'-O-methyl modified nucleotide
  modified_base 66: mod_base = OTHER; note = 2'-O-methyl modified nucleotide
  modified_base 67: mod_base = OTHER; note = 2'-O-methyl modified nucleotide
  modified_base 70: mod_base = OTHER; note = 2'-O-methyl modified nucleotide
  modified_base 71: mod_base = OTHER; note = 2'-O-methyl modified nucleotide
  modified_base 72: mod_base = OTHER; note = 2'-O-methyl modified nucleotide
  modified_base 74: mod_base = OTHER; note = 2'-O-methyl modified nucleotide
  modified_base 75: mod_base = OTHER; note = 2'-O-methyl modified nucleotide
  modified_base 76: mod_base = OTHER; note = 2'-O-methyl modified nucleotide
  modified_base 77: mod_base = OTHER; note = 2'-O-methyl modified nucleotide
  modified_base 78: mod_base = OTHER; note = 2'-O-methyl modified nucleotide
  modified_base 79: mod_base = OTHER; note = 2'-O-methyl modified nucleotide
  modified_base 80: mod_base = OTHER; note = 2'-O-methyl modified nucleotide
  modified_base 81: mod_base = OTHER; note = 2'-O-methyl modified nucleotide
  modified_base 83: mod_base = OTHER; note = 2'-O-methyl modified nucleotide
  modified_base 84: mod_base = OTHER; note = 2'-O-methyl modified nucleotide
  modified_base 85: mod_base = OTHER; note = 2'-O-methyl modified nucleotide
  modified_base 86: mod_base = OTHER; note = 2'-O-methyl modified nucleotide
  modified_base 87: mod_base = OTHER; note = 2'-O-methyl modified nucleotide
  modified_base 88: mod_base = OTHER; note = 2'-O-methyl modified nucleotide
  modified_base 89: mod_base = OTHER; note = 2'-O-methyl modified nucleotide
  modified_base 90: mod_base = OTHER; note = 2'-O-methyl modified nucleotide
  modified_base 91: mod_base = OTHER; note = 2'-O-methyl modified nucleotide
  modified_base 92: mod_base = OTHER; note = 2'-O-methyl modified nucleotide
  modified_base 93: mod_base = OTHER; note = 2'-O-methyl modified nucleotide
  modified_base 94: mod_base = OTHER; note = 2'-O-methyl modified nucleotide
  modified_base 95: mod_base = OTHER; note = 2'-O-methyl modified nucleotide
  modified_base 96: mod_base = OTHER; note = 2'-O-methyl modified nucleotide
  modified_base 97: mod_base = OTHER; note = 2'-O-methyl modified nucleotide with phosphorothioate linkage
  modified_base 98: mod_base = OTHER; note = 2'-O-methyl modified nucleotide with phosphorothioate linkage
  modified_base 99: mod_base = OTHER; note = 2'-O-methyl modified nucleotide with phosphorothioate linkage
  modified_base 100: mod_base = OTHER; note = 2'-O-methyl modified nucleotide

SEQ ID NO: 357 - RNA, 100 nt, synthetic construct; identical to SEQ ID NO: 235
  source 1..100: mol_type = other RNA
  modified_base 1: mod_base = OTHER; note = 2'-O-methyl modified nucleotide with phosphorothioate linkage
  modified_base 2: mod_base = OTHER; note = 2'-O-methyl modified nucleotide with phosphorothioate linkage
  modified_base 3: mod_base = OTHER; note = 2'-O-methyl modified nucleotide with phosphorothioate linkage
  modified_base 97: mod_base = OTHER; note = Nucleotide with phosphorothioate linkage
  modified_base 98: mod_base = OTHER; note = 2'-O-methyl modified nucleotide with phosphorothioate linkage
  modified_base 99: mod_base = OTHER; note = 2'-O-methyl modified nucleotide with phosphorothioate linkage
  modified_base 100: mod_base = OTHER; note = 2'-O-methyl modified nucleotide

SEQ ID NO: 358 - RNA, 100 nt, synthetic construct; identical to SEQ ID NO: 236
  source 1..100: mol_type = other RNA
  modified_base 1: mod_base = OTHER; note = 2'-O-methyl modified nucleotide with phosphorothioate linkage
  modified_base 2: mod_base = OTHER; note = 2'-O-methyl modified nucleotide with phosphorothioate linkage
  modified_base 3: mod_base = OTHER; note = 2'-O-methyl modified nucleotide with phosphorothioate linkage
  modified_base 97: mod_base = OTHER; note = Nucleotide with phosphorothioate linkage
  modified_base 98: mod_base = OTHER; note = 2'-O-methyl modified nucleotide with phosphorothioate linkage
  modified_base 99: mod_base = OTHER; note = 2'-O-methyl modified nucleotide with phosphorothioate linkage
  modified_base 100: mod_base = OTHER; note = 2'-O-methyl modified nucleotide

SEQ ID NO: 359 - RNA, 100 nt, synthetic construct; identical to SEQ ID NO: 237
  source 1..100: mol_type = other RNA
  modified_base 1: mod_base = OTHER; note = 2'-O-methyl modified nucleotide with phosphorothioate linkage
  modified_base 2: mod_base = OTHER; note = 2'-O-methyl modified nucleotide with phosphorothioate linkage
  modified_base 3: mod_base = OTHER; note = 2'-O-methyl modified nucleotide with phosphorothioate linkage
  modified_base 97: mod_base = OTHER; note = Nucleotide with phosphorothioate linkage
  modified_base 98: mod_base = OTHER; note = 2'-O-methyl modified nucleotide with phosphorothioate linkage
  modified_base 99: mod_base = OTHER; note = 2'-O-methyl modified nucleotide with phosphorothioate linkage
  modified_base 100: mod_base = OTHER; note = 2'-O-methyl modified nucleotide

SEQ ID NO: 360 - RNA, 100 nt, synthetic construct; identical to SEQ ID NO: 238
  source 1..100: mol_type = other RNA
  modified_base 1: mod_base = OTHER; note = 2'-O-methyl modified nucleotide with phosphorothioate linkage
  modified_base 2: mod_base = OTHER; note = 2'-O-methyl modified nucleotide with phosphorothioate linkage
  modified_base 3: mod_base = OTHER; note = 2'-O-methyl modified nucleotide with phosphorothioate linkage
  modified_base 97: mod_base = OTHER; note = Nucleotide with phosphorothioate linkage
  modified_base 98: mod_base = OTHER; note = 2'-O-methyl modified nucleotide with phosphorothioate linkage
  modified_base 99: mod_base = OTHER; note = 2'-O-methyl modified nucleotide with phosphorothioate linkage
  modified_base 100: mod_base = OTHER; note = 2'-O-methyl modified nucleotide

SEQ ID NO: 361 - RNA, 100 nt, synthetic construct; identical to SEQ ID NO: 239
  source 1..100: mol_type = other RNA
  modified_base 1: mod_base = OTHER; note = 2'-O-methyl modified nucleotide with phosphorothioate linkage
  modified_base 2: mod_base = OTHER; note = 2'-O-methyl modified nucleotide with phosphorothioate linkage
  modified_base 3: mod_base = OTHER; note = 2'-O-methyl modified nucleotide with phosphorothioate linkage
  modified_base 97: mod_base = OTHER; note = Nucleotide with phosphorothioate linkage
  modified_base 98: mod_base = OTHER; note = 2'-O-methyl modified nucleotide with phosphorothioate linkage
  modified_base 99: mod_base = OTHER; note = 2'-O-methyl modified nucleotide with phosphorothioate linkage
  modified_base 100: mod_base = OTHER; note = 2'-O-methyl modified nucleotide

SEQ ID NO: 362 - RNA, 100 nt, synthetic construct; identical to SEQ ID NO: 240
  source 1..100: mol_type = other RNA
  modified_base 1: mod_base = OTHER; note = 2'-O-methyl modified nucleotide with phosphorothioate linkage
  modified_base 2: mod_base = OTHER; note = 2'-O-methyl modified nucleotide with phosphorothioate linkage
  modified_base 3: mod_base = OTHER; note = 2'-O-methyl modified nucleotide with phosphorothioate linkage
  modified_base 97: mod_base = OTHER; note = Nucleotide with phosphorothioate linkage
  modified_base 98: mod_base = OTHER; note = 2'-O-methyl modified nucleotide with phosphorothioate linkage
  modified_base 99: mod_base = OTHER; note = 2'-O-methyl modified nucleotide with phosphorothioate linkage
  modified_base 100: mod_base = OTHER; note = 2'-O-methyl modified nucleotide

SEQ ID NO: 363 - RNA, 100 nt, synthetic construct; identical to SEQ ID NO: 241
  source 1..100: mol_type = other RNA
  modified_base 1: mod_base = OTHER; note = 2'-O-methyl modified nucleotide with phosphorothioate linkage
  modified_base 2: mod_base = OTHER; note = 2'-O-methyl modified nucleotide with phosphorothioate linkage
  modified_base 3: mod_base = OTHER; note = 2'-O-methyl modified nucleotide with phosphorothioate linkage
  modified_base 97: mod_base = OTHER; note = Nucleotide with phosphorothioate linkage
  modified_base 98: mod_base = OTHER; note = 2'-O-methyl modified nucleotide with phosphorothioate linkage
  modified_base 99: mod_base = OTHER; note = 2'-O-methyl modified nucleotide with phosphorothioate linkage
  modified_base 100: mod_base = OTHER; note = 2'-O-methyl modified nucleotide

SEQ ID NO: 364 - RNA, 100 nt, synthetic construct; identical to SEQ ID NO: 242
  source 1..100: mol_type = other RNA
  modified_base 1: mod_base = OTHER; note = 2'-O-methyl modified nucleotide with phosphorothioate linkage
  modified_base 2: mod_base = OTHER; note = 2'-O-methyl modified nucleotide with phosphorothioate linkage
  modified_base 3: mod_base = OTHER; note = 2'-O-methyl modified nucleotide with phosphorothioate linkage
  modified_base 97: mod_base = OTHER; note = Nucleotide with phosphorothioate linkage
  modified_base 98: mod_base = OTHER; note = 2'-O-methyl modified nucleotide with phosphorothioate linkage
  modified_base 99: mod_base = OTHER; note = 2'-O-methyl modified nucleotide with phosphorothioate linkage
  modified_base 100: mod_base = OTHER; note = 2'-O-methyl modified nucleotide

SEQ ID NO: 365 - RNA, 100 nt, synthetic construct; identical to SEQ ID NO: 243
  source 1..100: mol_type = other RNA
  modified_base 1: mod_base = OTHER; note = 2'-O-methyl modified nucleotide with phosphorothioate linkage
  modified_base 2: mod_base = OTHER; note = 2'-O-methyl modified nucleotide with phosphorothioate linkage
  modified_base 3: mod_base = OTHER; note = 2'-O-methyl modified nucleotide with phosphorothioate linkage
  modified_base 97: mod_base = OTHER; note = Nucleotide with phosphorothioate linkage
  modified_base 98: mod_base = OTHER; note = 2'-O-methyl modified nucleotide with phosphorothioate linkage
  modified_base 99: mod_base = OTHER; note = 2'-O-methyl modified nucleotide with phosphorothioate linkage
  modified_base 100: mod_base = OTHER; note = 2'-O-methyl modified nucleotide

SEQ ID NO: 366 - RNA, 100 nt, synthetic construct; identical to SEQ ID NO: 244
  source 1..100: mol_type = other RNA
  modified_base 1: mod_base = OTHER; note = 2'-O-methyl modified nucleotide with phosphorothioate linkage
  modified_base 2: mod_base = OTHER; note = 2'-O-methyl modified nucleotide with phosphorothioate linkage
  modified_base 3: mod_base = OTHER; note = 2'-O-methyl modified nucleotide with phosphorothioate linkage
  modified_base 97: mod_base = OTHER; note = Nucleotide with phosphorothioate linkage
  modified_base 98: mod_base = OTHER; note = 2'-O-methyl modified nucleotide with phosphorothioate linkage
  modified_base 99: mod_base = OTHER; note = 2'-O-methyl modified nucleotide with phosphorothioate linkage
  modified_base 100: mod_base = OTHER; note = 2'-O-methyl modified nucleotide

SEQ ID NO: 367 - RNA, 100 nt, synthetic construct; identical to SEQ ID NO: 245
  source 1..100: mol_type = other RNA
  modified_base 1: mod_base = OTHER; note = 2'-O-methyl modified nucleotide with phosphorothioate linkage
  modified_base 2: mod_base = OTHER; note = 2'-O-methyl modified nucleotide with phosphorothioate linkage
  modified_base 3: mod_base = OTHER; note = 2'-O-methyl modified nucleotide with phosphorothioate linkage
  modified_base 97: mod_base = OTHER; note = Nucleotide with phosphorothioate linkage
  modified_base 98: mod_base = OTHER; note = 2'-O-methyl modified nucleotide with phosphorothioate linkage
  modified_base 99: mod_base = OTHER; note = 2'-O-methyl modified nucleotide with phosphorothioate linkage
  modified_base 100: mod_base = OTHER; note = 2'-O-methyl modified nucleotide

SEQ ID NO: 368 - RNA, 100 nt, synthetic construct; identical to SEQ ID NO: 246
  source 1..100: mol_type = other RNA
  modified_base 1: mod_base = OTHER; note = 2'-O-methyl modified nucleotide with phosphorothioate linkage
  modified_base 2: mod_base = OTHER; note = 2'-O-methyl modified nucleotide with phosphorothioate linkage
  modified_base 3: mod_base = OTHER; note = 2'-O-methyl modified nucleotide with phosphorothioate linkage
  modified_base 97: mod_base = OTHER; note = Nucleotide with phosphorothioate linkage
  modified_base 98: mod_base = OTHER; note = 2'-O-methyl modified nucleotide with phosphorothioate linkage
  modified_base 99: mod_base = OTHER; note = 2'-O-methyl modified nucleotide with phosphorothioate linkage
  modified_base 100: mod_base = OTHER; note = 2'-O-methyl modified nucleotide

SEQ ID NO: 369 - RNA, 100 nt, synthetic construct; identical to SEQ ID NO: 247
  source 1..100: mol_type = other RNA
  modified_base 1: mod_base = OTHER; note = 2'-O-methyl modified nucleotide with phosphorothioate linkage
  modified_base 2: mod_base = OTHER; note = 2'-O-methyl modified nucleotide with phosphorothioate linkage
  modified_base 3: mod_base = OTHER; note = 2'-O-methyl modified nucleotide with phosphorothioate linkage
  modified_base 97: mod_base = OTHER; note = Nucleotide with phosphorothioate linkage
  modified_base 98: mod_base = OTHER; note = 2'-O-methyl modified nucleotide with phosphorothioate linkage
  modified_base 99: mod_base = OTHER; note = 2'-O-methyl modified nucleotide with phosphorothioate linkage
  modified_base 100: mod_base = OTHER; note = 2'-O-methyl modified nucleotide

SEQ ID NO: 370 - RNA, 100 nt, synthetic construct; identical to SEQ ID NO: 248
  source 1..100: mol_type = other RNA
  modified_base 1: mod_base = OTHER; note = 2'-O-methyl modified nucleotide with phosphorothioate linkage
  modified_base 2: mod_base = OTHER; note = 2'-O-methyl modified nucleotide with phosphorothioate linkage
  modified_base 3: mod_base = OTHER; note = 2'-O-methyl modified nucleotide with phosphorothioate linkage
  modified_base 97: mod_base = OTHER; note = Nucleotide with phosphorothioate linkage
  modified_base 98: mod_base = OTHER; note = 2'-O-methyl modified nucleotide with phosphorothioate linkage
  modified_base 99: mod_base = OTHER; note = 2'-O-methyl modified nucleotide with phosphorothioate linkage
  modified_base 100: mod_base = OTHER; note = 2'-O-methyl modified nucleotide

SEQ ID NO: 371 - RNA, 100 nt, synthetic construct; identical to SEQ ID NO: 249
  source 1..100: mol_type = other RNA
  modified_base 1: mod_base = OTHER; note = 2'-O-methyl modified nucleotide with phosphorothioate linkage
  modified_base 2: mod_base = OTHER; note = 2'-O-methyl modified nucleotide with phosphorothioate linkage
  modified_base 3: mod_base = OTHER; note = 2'-O-methyl modified nucleotide with phosphorothioate linkage
  modified_base 97: mod_base = OTHER; note = Nucleotide with phosphorothioate linkage
  modified_base 98: mod_base = OTHER; note = 2'-O-methyl modified nucleotide with phosphorothioate linkage
  modified_base 99: mod_base = OTHER; note = 2'-O-methyl modified nucleotide with phosphorothioate linkage
  modified_base 100: mod_base = OTHER; note = 2'-O-methyl modified nucleotide

SEQ ID NO: 372 - RNA, 100 nt, synthetic construct; identical to SEQ ID NO: 250
  source 1..100: mol_type = other RNA
  modified_base 1: mod_base = OTHER; note = 2'-O-methyl modified nucleotide with phosphorothioate linkage
  modified_base 2: mod_base = OTHER; note = 2'-O-methyl modified nucleotide with phosphorothioate linkage
  modified_base 3: mod_base = OTHER; note = 2'-O-methyl modified nucleotide with phosphorothioate linkage
  modified_base 97: mod_base = OTHER; note = Nucleotide with phosphorothioate linkage
  modified_base 98: mod_base = OTHER; note = 2'-O-methyl modified nucleotide with phosphorothioate linkage
  modified_base 99: mod_base = OTHER; note = 2'-O-methyl modified nucleotide with phosphorothioate linkage
  modified_base 100: mod_base = OTHER; note = 2'-O-methyl modified nucleotide

SEQ ID NO: 373 - RNA, 100 nt, synthetic construct; identical to SEQ ID NO: 251
  source 1..100: mol_type = other RNA
  modified_base 1: mod_base = OTHER; note = 2'-O-methyl modified nucleotide with phosphorothioate linkage
  modified_base 2: mod_base = OTHER; note = 2'-O-methyl modified nucleotide with phosphorothioate linkage
  modified_base 3: mod_base = OTHER; note = 2'-O-methyl modified nucleotide with phosphorothioate linkage
  modified_base 97: mod_base = OTHER; note = Nucleotide with phosphorothioate linkage
  modified_base 98: mod_base = OTHER; note = 2'-O-methyl modified nucleotide with phosphorothioate linkage
  modified_base 99: mod_base = OTHER; note = 2'-O-methyl modified nucleotide with phosphorothioate linkage
  modified_base 100: mod_base = OTHER; note = 2'-O-methyl modified nucleotide

SEQ ID NO: 374 - RNA, 100 nt, synthetic construct; identical to SEQ ID NO: 252
  source 1..100: mol_type = other RNA
  modified_base 1: mod_base = OTHER; note = 2'-O-methyl modified nucleotide with phosphorothioate linkage
  modified_base 2: mod_base = OTHER; note = 2'-O-methyl modified nucleotide with phosphorothioate linkage
  modified_base 3: mod_base = OTHER; note = 2'-O-methyl modified nucleotide with phosphorothioate linkage
  modified_base 97: mod_base = OTHER; note = Nucleotide with phosphorothioate linkage
  modified_base 98: mod_base = OTHER; note = 2'-O-methyl modified nucleotide with phosphorothioate linkage
  modified_base 99: mod_base = OTHER; note = 2'-O-methyl modified nucleotide with phosphorothioate linkage
  modified_base 100: mod_base = OTHER; note = 2'-O-methyl modified nucleotide

SEQ ID NO: 375 - RNA, 100 nt, synthetic construct; identical to SEQ ID NO: 253
  source 1..100: mol_type = other RNA
  modified_base 1: mod_base = OTHER; note = 2'-O-methyl modified nucleotide with phosphorothioate linkage
  modified_base 2: mod_base = OTHER; note = 2'-O-methyl modified nucleotide with phosphorothioate linkage
  modified_base 3: mod_base = OTHER; note = 2'-O-methyl modified nucleotide with phosphorothioate linkage
  modified_base 97: mod_base = OTHER; note = Nucleotide with phosphorothioate linkage
  modified_base 98: mod_base = OTHER; note = 2'-O-methyl modified nucleotide with phosphorothioate linkage
  modified_base 99: mod_base = OTHER; note = 2'-O-methyl modified nucleotide with phosphorothioate linkage
  modified_base 100: mod_base = OTHER; note = 2'-O-methyl modified nucleotide

SEQ ID NO: 376 - RNA, 100 nt, synthetic construct; identical to SEQ ID NO: 254
  source 1..100: mol_type = other RNA
  modified_base 1: mod_base = OTHER; note = 2'-O-methyl modified nucleotide with phosphorothioate linkage
  modified_base 2: mod_base = OTHER; note = 2'-O-methyl modified nucleotide with phosphorothioate linkage
  modified_base 3: mod_base = OTHER; note = 2'-O-methyl modified nucleotide with phosphorothioate linkage
  modified_base 97: mod_base = OTHER; note = Nucleotide with phosphorothioate linkage
  modified_base 98: mod_base = OTHER; note = 2'-O-methyl modified nucleotide with phosphorothioate linkage
  modified_base 99: mod_base = OTHER; note = 2'-O-methyl modified nucleotide with phosphorothioate linkage
  modified_base 100: mod_base = OTHER; note = 2'-O-methyl modified nucleotide

SEQ ID NO: 377 - RNA, 100 nt, synthetic construct; identical to SEQ ID NO: 255
  source 1..100: mol_type = other RNA
  modified_base 1: mod_base = OTHER; note = 2'-O-methyl modified nucleotide with phosphorothioate linkage
  modified_base 2: mod_base = OTHER; note = 2'-O-methyl modified nucleotide with phosphorothioate linkage
  modified_base 3: mod_base = OTHER; note = 2'-O-methyl modified nucleotide with phosphorothioate linkage
  modified_base 97: mod_base = OTHER; note = Nucleotide with phosphorothioate linkage
  modified_base 98: mod_base = OTHER; note = 2'-O-methyl modified nucleotide with phosphorothioate linkage
  modified_base 99: mod_base = OTHER; note = 2'-O-methyl modified nucleotide with phosphorothioate linkage
  modified_base 100: mod_base = OTHER; note = 2'-O-methyl modified nucleotide

SEQ ID NO: 378 - RNA, 100 nt, synthetic construct; identical to SEQ ID NO: 256
  source 1..100: mol_type = other RNA
  modified_base 1: mod_base = OTHER; note = 2'-O-methyl modified nucleotide with phosphorothioate linkage
  modified_base 2: mod_base = OTHER; note = 2'-O-methyl modified nucleotide with phosphorothioate linkage
  modified_base 3: mod_base = OTHER; note = 2'-O-methyl modified nucleotide with phosphorothioate linkage
  modified_base 97: mod_base = OTHER; note = Nucleotide with phosphorothioate linkage
  modified_base 98: mod_base = OTHER; note = 2'-O-methyl modified nucleotide with phosphorothioate linkage
  modified_base 99: mod_base = OTHER; note = 2'-O-methyl modified nucleotide with phosphorothioate linkage
  modified_base 100: mod_base = OTHER; note = 2'-O-methyl modified nucleotide

SEQ ID NO: 379 - RNA, 100 nt, synthetic construct; identical to SEQ ID NO: 257
  source 1..100: mol_type = other RNA
  modified_base 1: mod_base = OTHER; note = 2'-O-methyl modified nucleotide with phosphorothioate linkage
  modified_base 2: mod_base = OTHER; note = 2'-O-methyl modified nucleotide with phosphorothioate linkage
  modified_base 3: mod_base = OTHER; note = 2'-O-methyl modified nucleotide with phosphorothioate linkage
  modified_base 97: mod_base = OTHER; note = Nucleotide with phosphorothioate linkage
  modified_base 98: mod_base = OTHER; note = 2'-O-methyl modified nucleotide with phosphorothioate linkage
  modified_base 99: mod_base = OTHER; note = 2'-O-methyl modified nucleotide with phosphorothioate linkage
  modified_base 100: mod_base = OTHER; note = 2'-O-methyl modified nucleotide

SEQ ID NO: 380 - RNA, 100 nt, synthetic construct; identical to SEQ ID NO: 258
  source 1..100: mol_type = other RNA
  modified_base 1: mod_base = OTHER; note = 2'-O-methyl modified nucleotide with phosphorothioate linkage
  modified_base 2: mod_base = OTHER; note = 2'-O-methyl modified nucleotide with phosphorothioate linkage
  modified_base 3: mod_base = OTHER; note = 2'-O-methyl modified nucleotide with phosphorothioate linkage
  modified_base 97: mod_base = OTHER; note = Nucleotide with phosphorothioate linkage
  modified_base 98: mod_base = OTHER; note = 2'-O-methyl modified nucleotide with phosphorothioate linkage
  modified_base 99: mod_base = OTHER; note = 2'-O-methyl modified nucleotide with phosphorothioate linkage
  modified_base 100: mod_base = OTHER; note = 2'-O-methyl modified nucleotide

SEQ ID NO: 381 - RNA, 100 nt, synthetic construct; identical to SEQ ID NO: 259
  source 1..100: mol_type = other RNA
  modified_base 1: mod_base = OTHER; note = 2'-O-methyl modified nucleotide with phosphorothioate linkage
  modified_base 2: mod_base = OTHER; note = 2'-O-methyl modified nucleotide with phosphorothioate linkage
  modified_base 3: mod_base = OTHER; note = 2'-O-methyl modified nucleotide with phosphorothioate linkage
  modified_base 97: mod_base = OTHER; note = Nucleotide with phosphorothioate linkage
  modified_base 98: mod_base = OTHER; note = 2'-O-methyl modified nucleotide with phosphorothioate linkage
  modified_base 99: mod_base = OTHER; note = 2'-O-methyl modified nucleotide with phosphorothioate linkage
  modified_base 100: mod_base = OTHER; note = 2'-O-methyl modified nucleotide

SEQ ID NO: 382 - RNA, 100 nt, synthetic construct; identical to SEQ ID NO: 260
  source 1..100: mol_type = other RNA
  modified_base 1: mod_base = OTHER; note = 2'-O-methyl modified nucleotide with phosphorothioate linkage
  modified_base 2: mod_base = OTHER; note = 2'-O-methyl modified nucleotide with phosphorothioate linkage
  modified_base 3: mod_base = OTHER; note = 2'-O-methyl modified nucleotide with phosphorothioate linkage
  modified_base 97: mod_base = OTHER; note = Nucleotide with phosphorothioate linkage
  modified_base 98: mod_base = OTHER; note = 2'-O-methyl modified nucleotide with phosphorothioate linkage
  modified_base 99: mod_base = OTHER; note = 2'-O-methyl modified nucleotide with phosphorothioate linkage
  modified_base 100: mod_base = OTHER; note = 2'-O-methyl modified nucleotide

SEQ ID NO: 383 - RNA, 100 nt, synthetic construct; identical to SEQ ID NO: 261
  source 1..100: mol_type = other RNA
  modified_base 1: mod_base = OTHER; note = 2'-O-methyl modified nucleotide with phosphorothioate linkage
  modified_base 2: mod_base = OTHER; note = 2'-O-methyl modified nucleotide with phosphorothioate linkage
  modified_base 3: mod_base = OTHER; note = 2'-O-methyl modified nucleotide with phosphorothioate linkage
  modified_base 97: mod_base = OTHER; note = Nucleotide with phosphorothioate linkage
  modified_base 98: mod_base = OTHER; note = 2'-O-methyl modified nucleotide with phosphorothioate linkage
  modified_base 99: mod_base = OTHER; note = 2'-O-methyl modified nucleotide with phosphorothioate linkage
  modified_base 100: mod_base = OTHER; note = 2'-O-methyl modified nucleotide

SEQ ID NO: 384 - RNA, 100 nt, synthetic construct; identical to SEQ ID NO: 262
  source 1..100: mol_type = other RNA
  modified_base 1: mod_base = OTHER; note = 2'-O-methyl modified nucleotide with phosphorothioate linkage
  modified_base 2: mod_base = OTHER; note = 2'-O-methyl modified nucleotide with phosphorothioate linkage
  modified_base 3: mod_base = OTHER; note = 2'-O-methyl modified nucleotide with phosphorothioate linkage
  modified_base 97: mod_base = OTHER; note = Nucleotide with phosphorothioate linkage
  modified_base 98: mod_base = OTHER; note = 2'-O-methyl modified nucleotide with phosphorothioate linkage
  modified_base 99: mod_base = OTHER; note = 2'-O-methyl modified nucleotide with phosphorothioate linkage
  modified_base 100: mod_base = OTHER; note = 2'-O-methyl modified nucleotide

SEQ ID NO: 385 - RNA, 100 nt, synthetic construct; identical to SEQ ID NO: 262
  source 1..100: mol_type = other RNA
  modified_base 1: mod_base = OTHER; note = 2'-O-methyl modified nucleotide with phosphorothioate linkage
  modified_base 2: mod_base = OTHER; note = 2'-O-methyl modified nucleotide with phosphorothioate linkage
  modified_base 3: mod_base = OTHER; note = 2'-O-methyl modified nucleotide with phosphorothioate linkage
  modified_base 21: mod_base = OTHER; note = 2'-O-methyl modified nucleotide
  modified_base 28: mod_base = OTHER; note = 2'-O-methyl modified nucleotide
  modified_base 29: mod_base = OTHER; note = 2'-O-methyl modified nucleotide
  modified_base 30: mod_base = OTHER; note = 2'-O-methyl modified nucleotide
  modified_base 31: mod_base = OTHER; note = 2'-O-methyl modified nucleotide
  modified_base 32: mod_base = OTHER; note = 2'-O-methyl modified nucleotide
  modified_base 34: mod_base = OTHER; note = 2'-O-methyl modified nucleotide
  modified_base 35: mod_base = OTHER; note = 2'-O-methyl modified nucleotide
  modified_base 36: mod_base = OTHER; note = 2'-O-methyl modified nucleotide
  modified_base 37: mod_base = OTHER; note = 2'-O-methyl modified nucleotide
  modified_base 38: mod_base = OTHER; note = 2'-O-methyl modified nucleotide
  modified_base 39: mod_base = OTHER; note = 2'-O-methyl modified nucleotide
  modified_base 40: mod_base = OTHER; note = 2'-O-methyl modified nucleotide
  modified_base 41: mod_base = OTHER; note = 2'-O-methyl modified nucleotide
  modified_base 42: mod_base = OTHER; note = 2'-O-methyl modified nucleotide
  modified_base 46: mod_base = OTHER; note = 2'-O-methyl modified nucleotide
  modified_base 48: mod_base = OTHER; note = 2'-O-methyl modified nucleotide
  modified_base 50: mod_base = OTHER; note = 2'-O-methyl modified nucleotide
  modified_base 52: mod_base = OTHER; note = 2'-O-methyl modified nucleotide
  modified_base 53: mod_base = OTHER; note = 2'-O-methyl modified nucleotide
  modified_base 54: mod_base = OTHER; note = 2'-O-methyl modified nucleotide
  modified_base 55: mod_base = OTHER; note = 2'-O-methyl modified nucleotide
  modified_base 56: mod_base = OTHER; note = 2'-O-methyl modified nucleotide
  modified_base 57: mod_base = OTHER; note = 2'-O-methyl modified nucleotide
  modified_base 60: mod_base = OTHER; note = 2'-O-methyl modified nucleotide
  modified_base 61: mod_base = OTHER; note = 2'-O-methyl modified nucleotide
  modified_base 66: mod_base = OTHER; note = 2'-O-methyl modified nucleotide
  modified_base 67: mod_base = OTHER; note = 2'-O-methyl modified nucleotide
  modified_base 70: mod_base = OTHER; note = 2'-O-methyl modified nucleotide
  modified_base 71: mod_base = OTHER; note = 2'-O-methyl modified nucleotide
  modified_base 72: mod_base = OTHER; note = 2'-O-methyl modified nucleotide
  modified_base 74: mod_base = OTHER; note = 2'-O-methyl modified nucleotide
  modified_base 75: mod_base = OTHER; note = 2'-O-methyl modified nucleotide
  modified_base 76: mod_base = OTHER; note = 2'-O-methyl modified nucleotide
  modified_base 77: mod_base = OTHER; note = 2'-O-methyl modified nucleotide
  modified_base 78: mod_base = OTHER; note = 2'-O-methyl modified nucleotide
  modified_base 79: mod_base = OTHER; note = 2'-O-methyl modified nucleotide
  modified_base 80: mod_base = OTHER; note = 2'-O-methyl modified nucleotide
  modified_base 81: mod_base = OTHER; note = 2'-O-methyl modified nucleotide
  modified_base 83: mod_base = OTHER; note = 2'-O-methyl modified nucleotide
  modified_base 84: mod_base = OTHER; note = 2'-O-methyl modified nucleotide
  modified_base 85: mod_base = OTHER; note = 2'-O-methyl modified nucleotide
  modified_base 86: mod_base = OTHER; note = 2'-O-methyl modified nucleotide
  modified_base 87: mod_base = OTHER; note = 2'-O-methyl modified nucleotide
  modified_base 88: mod_base = OTHER; note = 2'-O-methyl modified nucleotide
  modified_base 89: mod_base = OTHER; note = 2'-O-methyl modified nucleotide
  modified_base 90: mod_base = OTHER; note = 2'-O-methyl modified nucleotide
  modified_base 91: mod_base = OTHER; note = 2'-O-methyl modified nucleotide
  modified_base 92: mod_base = OTHER; note = 2'-O-methyl modified nucleotide
  modified_base 93: mod_base = OTHER; note = 2'-O-methyl modified nucleotide
  modified_base 94: mod_base = OTHER; note = 2'-O-methyl modified nucleotide
  modified_base 95: mod_base = OTHER; note = 2'-O-methyl modified nucleotide
  modified_base 96: mod_base = OTHER; note = 2'-O-methyl modified nucleotide
  modified_base 97: mod_base = OTHER; note = 2'-O-methyl modified nucleotide with phosphorothioate linkage
  modified_base 98: mod_base = OTHER; note = 2'-O-methyl modified nucleotide with phosphorothioate linkage
  modified_base 99: mod_base = OTHER; note = 2'-O-methyl modified nucleotide with phosphorothioate linkage
  modified_base 100: mod_base = OTHER; note = 2'-O-methyl modified nucleotide

SEQ ID NO: 386 - RNA, 100 nt, synthetic construct; identical to SEQ ID NO: 263
  source 1..100: mol_type = other RNA
  modified_base 1: mod_base = OTHER; note = 2'-O-methyl modified nucleotide with phosphorothioate linkage
  modified_base 2: mod_base = OTHER; note = 2'-O-methyl modified nucleotide with phosphorothioate linkage
  modified_base 3: mod_base = OTHER; note = 2'-O-methyl modified nucleotide with phosphorothioate linkage
  modified_base 97: mod_base = OTHER; note = Nucleotide with phosphorothioate linkage
  modified_base 98: mod_base = OTHER; note = 2'-O-methyl modified nucleotide with phosphorothioate linkage
  modified_base 99: mod_base = OTHER; note = 2'-O-methyl modified nucleotide with phosphorothioate linkage
  modified_base 100: mod_base = OTHER; note = 2'-O-methyl modified nucleotide

SEQ ID NO: 387 - RNA, 100 nt, synthetic construct; identical to SEQ ID NO: 263
  source 1..100: mol_type = other RNA
  modified_base 1: mod_base = OTHER; note = 2'-O-methyl modified nucleotide with phosphorothioate linkage
  modified_base 2: mod_base = OTHER; note = 2'-O-methyl modified nucleotide with phosphorothioate linkage
  modified_base 3: mod_base = OTHER; note = 2'-O-methyl modified nucleotide with phosphorothioate linkage
  modified_base 21: mod_base = OTHER; note = 2'-O-methyl modified nucleotide
  modified_base 28: mod_base = OTHER; note = 2'-O-methyl modified nucleotide
  modified_base 29: mod_base = OTHER; note = 2'-O-methyl modified nucleotide
  modified_base 30: mod_base = OTHER; note = 2'-O-methyl modified nucleotide
  modified_base 31: mod_base = OTHER; note = 2'-O-methyl modified nucleotide
  modified_base 32: mod_base = OTHER; note = 2'-O-methyl modified nucleotide
  modified_base 34: mod_base = OTHER; note = 2'-O-methyl modified nucleotide
  modified_base 35: mod_base = OTHER; note = 2'-O-methyl modified nucleotide
  modified_base 36: mod_base = OTHER; note = 2'-O-methyl modified nucleotide
  modified_base 37: mod_base = OTHER; note = 2'-O-methyl modified nucleotide
  modified_base 38: mod_base = OTHER; note = 2'-O-methyl modified nucleotide
  modified_base 39: mod_base = OTHER; note = 2'-O-methyl modified nucleotide
  modified_base 40: mod_base = OTHER; note = 2'-O-methyl modified nucleotide
  modified_base 41: mod_base = OTHER; note = 2'-O-methyl modified nucleotide
  modified_base 42: mod_base = OTHER; note = 2'-O-methyl modified nucleotide
  modified_base 46: mod_base = OTHER; note = 2'-O-methyl modified nucleotide
  modified_base 48: mod_base = OTHER; note = 2'-O-methyl modified nucleotide
  modified_base 50: mod_base = OTHER; note = 2'-O-methyl modified nucleotide
  modified_base 52: mod_base = OTHER; note = 2'-O-methyl modified nucleotide
  modified_base 53: mod_base = OTHER; note = 2'-O-methyl modified nucleotide
  modified_base 54: mod_base = OTHER; note = 2'-O-methyl modified nucleotide
  modified_base 55: mod_base = OTHER; note = 2'-O-methyl modified nucleotide
  modified_base 56: mod_base = OTHER; note = 2'-O-methyl modified nucleotide
  modified_base 57: mod_base = OTHER; note = 2'-O-methyl modified nucleotide
  modified_base 60: mod_base = OTHER; note = 2'-O-methyl modified nucleotide
  modified_base 61: mod_base = OTHER; note = 2'-O-methyl modified nucleotide
  modified_base 66: mod_base = OTHER; note = 2'-O-methyl modified nucleotide
  modified_base 67: mod_base = OTHER; note = 2'-O-methyl modified nucleotide
  modified_base 70: mod_base = OTHER; note = 2'-O-methyl modified nucleotide
  modified_base 71: mod_base = OTHER; note = 2'-O-methyl modified nucleotide
  modified_base 72: mod_base = OTHER; note = 2'-O-methyl modified nucleotide
  modified_base 74: mod_base = OTHER; note = 2'-O-methyl modified nucleotide
  modified_base 75: mod_base = OTHER; note = 2'-O-methyl modified nucleotide
  modified_base 76: mod_base = OTHER; note = 2'-O-methyl modified nucleotide
  modified_base 77: mod_base = OTHER; note = 2'-O-methyl modified nucleotide
  modified_base 78: mod_base = OTHER; note = 2'-O-methyl modified nucleotide
  modified_base 79: mod_base = OTHER; note = 2'-O-methyl modified nucleotide
  modified_base 80: mod_base = OTHER; note = 2'-O-methyl modified nucleotide
  modified_base 81: mod_base = OTHER; note = 2'-O-methyl modified nucleotide
  modified_base 83: mod_base = OTHER; note = 2'-O-methyl modified nucleotide
  modified_base 84: mod_base = OTHER; note = 2'-O-methyl modified nucleotide
  modified_base 85: mod_base = OTHER; note = 2'-O-methyl modified nucleotide
  modified_base 86: mod_base = OTHER; note = 2'-O-methyl modified nucleotide
  modified_base 87: mod_base = OTHER; note = 2'-O-methyl modified nucleotide
  modified_base 88: mod_base = OTHER; note = 2'-O-methyl modified nucleotide
  modified_base 89: mod_base = OTHER; note = 2'-O-methyl modified nucleotide
  modified_base 90: mod_base = OTHER; note = 2'-O-methyl modified nucleotide
  modified_base 91: mod_base = OTHER; note = 2'-O-methyl modified nucleotide
  modified_base 92: mod_base = OTHER; note = 2'-O-methyl modified nucleotide
  modified_base 93: mod_base = OTHER; note = 2'-O-methyl modified nucleotide
  modified_base 94: mod_base = OTHER; note = 2'-O-methyl modified nucleotide
  modified_base 95: mod_base = OTHER; note = 2'-O-methyl modified nucleotide
  modified_base 96: mod_base = OTHER; note = 2'-O-methyl modified nucleotide
  modified_base 97: mod_base = OTHER; note = 2'-O-methyl modified nucleotide with phosphorothioate linkage
  modified_base 98: mod_base = OTHER; note = 2'-O-methyl modified nucleotide with phosphorothioate linkage
  modified_base 99: mod_base = OTHER; note = 2'-O-methyl modified nucleotide with phosphorothioate linkage
  modified_base 100: mod_base = OTHER; note = 2'-O-methyl modified nucleotide

SEQ ID NO: 388 - RNA, 100 nt, synthetic construct; identical to SEQ ID NO: 264
  source 1..100: mol_type = other RNA
  modified_base 1: mod_base = OTHER; note = 2'-O-methyl modified nucleotide with phosphorothioate linkage
  modified_base 2: mod_base = OTHER; note = 2'-O-methyl modified nucleotide with phosphorothioate linkage
  modified_base 3: mod_base = OTHER; note = 2'-O-methyl modified nucleotide with phosphorothioate linkage
  modified_base 97: mod_base = OTHER; note = Nucleotide with phosphorothioate linkage
  modified_base 98: mod_base = OTHER; note = 2'-O-methyl modified nucleotide with phosphorothioate linkage
  modified_base 99: mod_base = OTHER; note = 2'-O-methyl modified nucleotide with phosphorothioate linkage
  modified_base 100: mod_base = OTHER; note = 2'-O-methyl modified nucleotide

SEQ ID NO: 389 - RNA, 100 nt, synthetic construct; identical to SEQ ID NO: 265
  source 1..100: mol_type = other RNA
  modified_base 1: mod_base = OTHER; note = 2'-O-methyl modified nucleotide with phosphorothioate linkage
  modified_base 2: mod_base = OTHER; note = 2'-O-methyl modified nucleotide with phosphorothioate linkage
  modified_base 3: mod_base = OTHER; note = 2'-O-methyl modified nucleotide with phosphorothioate linkage
  modified_base 97: mod_base = OTHER; note = Nucleotide with phosphorothioate linkage
  modified_base 98: mod_base = OTHER; note = 2'-O-methyl modified nucleotide with phosphorothioate linkage
  modified_base 99: mod_base = OTHER; note = 2'-O-methyl modified nucleotide with phosphorothioate linkage
  modified_base 100: mod_base = OTHER; note = 2'-O-methyl modified nucleotide

SEQ ID NO: 390 - RNA, 100 nt, synthetic construct; identical to SEQ ID NO: 265
  source 1..100: mol_type = other RNA
  modified_base 1: mod_base = OTHER; note = 2'-O-methyl modified nucleotide with phosphorothioate linkage
  modified_base 2: mod_base = OTHER; note = 2'-O-methyl modified nucleotide with phosphorothioate linkage
  modified_base 3: mod_base = OTHER; note = 2'-O-methyl modified nucleotide with phosphorothioate linkage
  modified_base 21: mod_base = OTHER; note = 2'-O-methyl modified nucleotide
  modified_base 28: mod_base = OTHER; note = 2'-O-methyl modified nucleotide
  modified_base 29: mod_base = OTHER; note = 2'-O-methyl modified nucleotide
  modified_base 30: mod_base = OTHER; note = 2'-O-methyl modified nucleotide
  modified_base 31: mod_base = OTHER; note = 2'-O-methyl modified nucleotide
  modified_base 32: mod_base = OTHER; note = 2'-O-methyl modified nucleotide
  modified_base 34: mod_base = OTHER; note = 2'-O-methyl modified nucleotide
  modified_base 35: mod_base = OTHER; note = 2'-O-methyl modified nucleotide
  modified_base 36: mod_base = OTHER; note = 2'-O-methyl modified nucleotide
  modified_base 37: mod_base = OTHER; note = 2'-O-methyl modified nucleotide
  modified_base 38: mod_base = OTHER; note = 2'-O-methyl modified nucleotide
  modified_base 39: mod_base = OTHER; note = 2'-O-methyl modified nucleotide
  modified_base 40: mod_base = OTHER; note = 2'-O-methyl modified nucleotide
  modified_base 41: mod_base = OTHER; note = 2'-O-methyl modified nucleotide
  modified_base 42: mod_base = OTHER; note = 2'-O-methyl modified nucleotide
  modified_base 46: mod_base = OTHER; note = 2'-O-methyl modified nucleotide
  modified_base 48: mod_base = OTHER; note = 2'-O-methyl modified nucleotide
  modified_base 50: mod_base = OTHER; note = 2'-O-methyl modified nucleotide
  modified_base 52: mod_base = OTHER; note = 2'-O-methyl modified nucleotide
  modified_base 53: mod_base = OTHER; note = 2'-O-methyl modified nucleotide
  modified_base 54: mod_base = OTHER; note = 2'-O-methyl modified nucleotide
  modified_base 55: mod_base = OTHER; note = 2'-O-methyl modified nucleotide
  modified_base 56: mod_base = OTHER; note = 2'-O-methyl modified nucleotide
  modified_base 57: mod_base = OTHER; note = 2'-O-methyl modified nucleotide
  modified_base 60: mod_base = OTHER; note = 2'-O-methyl modified nucleotide
  modified_base 61: mod_base = OTHER; note = 2'-O-methyl modified nucleotide
  modified_base 66: mod_base = OTHER; note = 2'-O-methyl modified nucleotide
  modified_base 67: mod_base = OTHER; note = 2'-O-methyl modified nucleotide
  modified_base 70: mod_base = OTHER; note = 2'-O-methyl modified nucleotide
  modified_base 71: mod_base = OTHER; note = 2'-O-methyl modified nucleotide
  modified_base 72: mod_base = OTHER; note = 2'-O-methyl modified nucleotide
  modified_base 74: mod_base = OTHER; note = 2'-O-methyl modified nucleotide
  modified_base 75: mod_base = OTHER; note = 2'-O-methyl modified nucleotide
  modified_base 76: mod_base = OTHER; note = 2'-O-methyl modified nucleotide
  modified_base 77: mod_base = OTHER; note = 2'-O-methyl modified nucleotide
  modified_base 78: mod_base = OTHER; note = 2'-O-methyl modified nucleotide
  modified_base 79: mod_base = OTHER; note = 2'-O-methyl modified nucleotide
  modified_base 80: mod_base = OTHER; note = 2'-O-methyl modified nucleotide
  modified_base 81: mod_base = OTHER; note = 2'-O-methyl modified nucleotide
  modified_base 83: mod_base = OTHER; note = 2'-O-methyl modified nucleotide
  modified_base 84: mod_base = OTHER; note = 2'-O-methyl modified nucleotide
  modified_base 85: mod_base = OTHER; note = 2'-O-methyl modified nucleotide
  modified_base 86: mod_base = OTHER; note = 2'-O-methyl modified nucleotide
  modified_base 87: mod_base = OTHER; note = 2'-O-methyl modified nucleotide
  modified_base 88: mod_base = OTHER; note = 2'-O-methyl modified nucleotide
  modified_base 89: mod_base = OTHER; note = 2'-O-methyl modified nucleotide
  modified_base 90: mod_base = OTHER; note = 2'-O-methyl modified nucleotide
  modified_base 91: mod_base = OTHER; note = 2'-O-methyl modified nucleotide
  modified_base 92: mod_base = OTHER; note = 2'-O-methyl modified nucleotide
  modified_base 93: mod_base = OTHER; note = 2'-O-methyl modified nucleotide
  modified_base 94: mod_base = OTHER; note = 2'-O-methyl modified nucleotide
  modified_base 95: mod_base = OTHER; note = 2'-O-methyl modified nucleotide
  modified_base 96: mod_base = OTHER; note = 2'-O-methyl modified nucleotide
  modified_base 97: mod_base = OTHER; note = 2'-O-methyl modified nucleotide with phosphorothioate linkage
  modified_base 98: mod_base = OTHER; note = 2'-O-methyl modified nucleotide with phosphorothioate linkage
  modified_base 99: mod_base = OTHER; note = 2'-O-methyl modified nucleotide with phosphorothioate linkage
  modified_base 100: mod_base = OTHER; note = 2'-O-methyl modified nucleotide

SEQ ID NO: 391 - DNA, 20 bp, synthetic construct
  source 1..20: mol_type = other DNA
ctgtcaccaggcattgtgtc

SEQ ID NO: 392 - DNA, 20 bp, synthetic construct
  source 1..20: mol_type = other DNA
tgtccttgcaactctcacgg

SEQ ID NO: 393 - DNA, 20 bp, synthetic construct
  source 1..20: mol_type = other DNA
gtagtagcagtcctgtaccc

SEQ ID NO: 394 - DNA, 20 bp, synthetic construct
  source 1..20: mol_type = other DNA
cattatggacagagttaccg

SEQ ID NO: 395 - DNA, 20 bp, synthetic construct
  source 1..20: mol_type = other DNA
gtagcagtcctgtaccccgg

SEQ ID NO: 396 - DNA, 20 bp, synthetic construct
  source 1..20: mol_type = other DNA
agtagcagtcctgtaccccg

SEQ ID NO: 397 - DNA, 20 bp, synthetic construct
  source 1..20: mol_type = other DNA
tagtagcagtcctgtacccc

SEQ ID NO: 398 - DNA, 20 bp, synthetic construct
  source 1..20: mol_type = other DNA
aggacactcgattctgtcac

SEQ ID NO: 399 - DNA, 20 bp, synthetic construct
  source 1..20: mol_type = other DNA
cacaactcccacagtggccc

SEQ ID NO: 400 - DNA, 20 bp, synthetic construct
  source 1..20: mol_type = other DNA
ctgtcactggacattgtgtc

SEQ ID NO: 401 - DNA, 20 bp, synthetic construct
  source 1..20: mol_type = other DNA
aagtgtccttgcgacgtcca

SEQ ID NO: 402 - DNA, 20 bp, synthetic construct
  source 1..20: mol_type = other DNA
ggagcaaagccccacagtcc

SEQ ID NO: 403 - DNA, 20 bp, synthetic construct
  source 1..20: mol_type = other DNA
gttggtgctgaaattcaaag

SEQ ID NO: 404 - DNA, 20 bp, synthetic construct
  source 1..20: mol_type = other DNA
ggagcaaagccccggggtcc

SEQ ID NO: 405 - DNA, 20 bp, synthetic construct
  source 1..20: mol_type = other DNA
cttggaactgggaccaccgt

SEQ ID NO: 406 - DNA, 20 bp, synthetic construct
  source 1..20: mol_type = other DNA
acagagcttccttctgaaga

SEQ ID NO: 407 - DNA, 20 bp, synthetic construct
  source 1..20: mol_type = other DNA
atgccagtgtggtgtcatag

SEQ ID NO: 408 - DNA, 20 bp, synthetic construct
  source 1..20: mol_type = other DNA
accacagaatactacccaaa

SEQ ID NO: 409 - DNA, 20 bp, synthetic construct
  source 1..20: mol_type = other DNA
ggagccagaataacattcgg

SEQ ID NO: 410 - DNA, 20 bp, synthetic construct
  source 1..20: mol_type = other DNA
ctagaggctttttttgaaca

SEQ ID NO: 411 - DNA, 20 bp, synthetic construct
  source 1..20: mol_type = other DNA
cagatgctgagattagtcct

SEQ ID NO: 412 - DNA, 20 bp, synthetic construct
  source 1..20: mol_type = other DNA
tggattcctgcagtagttcc

SEQ ID NO: 413 - DNA, 20 bp, synthetic construct
  source 1..20: mol_type = other DNA
tgacaccacattggcatcgg

SEQ ID NO: 414 - DNA, 20 bp, synthetic construct
  source 1..20: mol_type = other DNA
acatgttcttcctgtgatag

SEQ ID NO: 415 - DNA, 20 bp, synthetic construct
  source 1..20: mol_type = other DNA
catagatgaccaagattgac

SEQ ID NO: 416 - DNA, 20 bp, synthetic construct
  source 1..20: mol_type = other DNA
tgataccacactggcatcag

SEQ ID NO: 417 - DNA, 20 bp, synthetic construct
  source 1..20: mol_type = other DNA
ccatcactggacattgcgtc

SEQ ID NO: 418 - DNA, 20 bp, synthetic construct
  source 1..20: mol_type = other DNA
aactctcctcacaactccca

SEQ ID NO: 419 - DNA, 20 bp, synthetic construct
  source 1..20: mol_type = other DNA
ctgcatctgagcatcgtgtc

SEQ ID NO: 420 - DNA, 20 bp, synthetic construct
  source 1..20: mol_type = other DNA
cgtccctccgaatgttattc

SEQ ID NO: 421 - DNA, 20 bp, synthetic construct
  source 1..20: mol_type = other DNA
aaacagccgtggacgtcgca

SEQ ID NO: 422 - DNA, 20 bp, synthetic construct
  source 1..20: mol_type = other DNA
tgaacaaggtaagaagtctc

SEQ ID NO: 423 - DNA, 20 bp, synthetic construct
  source 1..20: mol_type = other DNA
acagaggctccttctgaaca

SEQ ID NO: 424 - DNA, 20 bp, synthetic construct
  source 1..20: mol_type = other DNA
gcttggaaccggggccactg

SEQ ID NO: 425 - DNA, 20 bp, synthetic construct
  source 1..20: mol_type = other DNA
acaacagaatattatccaaa

SEQ ID NO: 426 - DNA, 20 bp, synthetic construct
  source 1..20: mol_type = other DNA
ctatgacaccacattggcat

SEQ ID NO: 427 - DNA, 20 bp, synthetic construct
  source 1..20: mol_type = other DNA
aataacattcggagggacga

SEQ ID NO: 428 - DNA, 20 bp, synthetic construct
  source 1..20: mol_type = other DNA
tattctggctccaagcctag

SEQ ID NO: 429 - DNA, 20 bp, synthetic construct
  source 1..20: mol_type = other DNA
gaacaacagtgggagtctct

SEQ ID NO: 430 - DNA, 20 bp, synthetic construct
  source 1..20: mol_type = other DNA
tgttccagttccaagcatgg

SEQ ID NO: 431 - DNA, 20 bp, synthetic construct
  source 1..20: mol_type = other DNA
aagcctctgtgcttggatct

SEQ ID NO: 432 - DNA, 20 bp, synthetic construct
  source 1..20: mol_type = other DNA
aggcttcttctgaagaaggt

SEQ ID NO: 433 - DNA, 20 bp, synthetic construct
  source 1..20: mol_type = other DNA
ctagggcctccttctgaaca

SEQ ID NO: 434 - DNA, 20 bp, synthetic construct
  source 1..20: mol_type = other DNA
cttggaacctggatgacagt

SEQ ID NO: 435 - DNA, 20 bp, synthetic construct
  source 1..20: mol_type = other DNA
tgttgttccagttccaagca

SEQ ID NO: 436 - DNA, 20 bp, synthetic construct
  source 1..20: mol_type = other DNA
cttggaaccggggccactgt

SEQ ID NO: 437 - DNA, 20 bp, synthetic construct
  source 1..20: mol_type = other DNA
acatacttcattactgtcac

SEQ ID NO: 438 - DNA, 20 bp, synthetic construct
  source 1..20: mol_type = other DNA
gataactctgtccatttccg

SEQ ID NO: 439 - DNA, 20 bp, synthetic construct
  source 1..20: mol_type = other DNA
taccccggttccaagcctag

SEQ ID NO: 440 - DNA, 20 bp, synthetic construct
  source 1..20: mol_type = other DNA
ggtaacagtcggaggcgcga

SEQ ID NO: 441 - DNA, 20 bp, synthetic construct
  source 1..20: mol_type = other DNA
caggaaggacctgccaagct

SEQ ID NO: 442 - DNA, 20 bp, synthetic construct
  source 1..20: mol_type = other DNA
ggtccttcctgtgacagtgg

SEQ ID NO: 443 - DNA, 20 bp, synthetic construct
  source 1..20: mol_type = other DNA
gttgtcctctgatgccagtg

SEQ ID NO: 444 - DNA, 20 bp, synthetic construct
  source 1..20: mol_type = other DNA
ggaccaccgtgagagttgca

SEQ ID NO: 445 - DNA, 20 bp, synthetic construct
  source 1..20: mol_type = other DNA
ggtcccagatccaagcacag

SEQ ID NO: 446 - DNA, 20 bp, synthetic construct
  source 1..20: mol_type = other DNA
aggagagttgattccatcac

SEQ ID NO: 447 - DNA, 20 bp, synthetic construct
  source 1..20: mol_type = other DNA
tctcctcacaactcccacgg

SEQ ID NO: 448 - DNA, 20 bp, synthetic construct
  source 1..20: mol_type = other DNA
gtggttctctgatgccagtg

SEQ ID NO: 449 - DNA, 20 bp, synthetic construct
  source 1..20: mol_type = other DNA
ccacagaatactacccaaat

SEQ ID NO: 450 - DNA, 20 bp, synthetic construct
  source 1..20: mol_type = other DNA
acagaggcttcttctgaaga

SEQ ID NO: 451 - DNA, 20 bp, synthetic construct
  source 1..20: mol_type = other DNA
tagtccttggtgttatacca

SEQ ID NO: 452 - DNA, 20 bp, synthetic construct
  source 1..20: mol_type = other DNA
caaggactaatctcagcatc

SEQ ID NO: 453 - DNA, 20 bp, synthetic construct
  source 1..20: mol_type = other DNA
caccaacggagcaaagcccc

SEQ ID NO: 454 - DNA, 20 bp, synthetic construct
  source 1..20: mol_type = other DNA
caacagaatattatccaaat

SEQ ID NO: 455 - DNA, 20 bp, synthetic construct
  source 1..20: mol_type = other DNA
tgacaccacatcaacataat

SEQ ID NO: 456 - DNA, 20 bp, synthetic construct
  source 1..20: mol_type = other DNA
catagatgaccaagcttggc

SEQ ID NO: 457 - DNA, 20 bp, synthetic construct
  source 1..20: mol_type = other DNA
cggatcggttgtgtaacacc

SEQ ID NO: 458 - DNA, 20 bp, synthetic construct
  source 1..20: mol_type = other DNA
aaccgatccgtgtgtgaggt

SEQ ID NO: 459 - DNA, 20 bp, synthetic construct
  source 1..20: mol_type = other DNA
tcgcccttggtgttacacca

SEQ ID NO: 460 - DNA, 20 bp, synthetic construct
  source 1..20: mol_type = other DNA
caagggcgaatctcagcatc

SEQ ID NO: 461 - DNA, 20 bp, synthetic construct
  source 1..20: mol_type = other DNA
caggaagaacctgccaagct

SEQ ID NO: 462 - DNA, 20 bp, synthetic construct
  source 1..20: mol_type = other DNA
ggttcttcctgtgacagtgg

SEQ ID NO: 463 - DNA, 20 bp, synthetic construct
  source 1..20: mol_type = other DNA
ggtaatagttggaggcgcga

SEQ ID NO: 464 - DNA, 20 bp, synthetic construct
  source 1..20: mol_type = other DNA
taccccgattccaagcctag

SEQ ID NO: 465 - DNA, 20 bp, synthetic construct
  source 1..20: mol_type = other DNA
actgtggggctttgctccgt

SEQ ID NO: 466 - DNA, 20 bp, synthetic construct
  source 1..20: mol_type = other DNA
acagtccaggactgctacca

SEQ ID NO: 467 - DNA, 20 bp, synthetic construct
  source 1..20: mol_type = other DNA
ctgtgtctgagcatcgcgtc

SEQ ID NO: 468 - DNA, 20 bp, synthetic construct
  source 1..20: mol_type = other DNA
ctcagacacagaagggactg

SEQ ID NO: 469 - DNA, 20 bp, synthetic construct
  source 1..20: mol_type = other DNA
catggatcccagtgtcagat

SEQ ID NO: 470 - DNA, 20 bp, synthetic construct
  source 1..20: mol_type = other DNA
gatccatggtataacaccaa

SEQ ID NO: 471 - DNA, 20 bp, synthetic construct
  source 1..20: mol_type = other DNA
gcaccaacggagcaaagccc

SEQ ID NO: 472 - DNA, 20 bp, synthetic construct
  source 1..20: mol_type = other DNA
tgaaaacagcactggggtcc

SEQ ID NO: 473 - DNA, 20 bp, synthetic construct
  source 1..20: mol_type = other DNA
accccagtgctgttttcagt

SEQ ID NO: 474 - DNA, 20 bp, synthetic construct
  source 1..20: mol_type = other DNA
aactcaaggttgtacccatt

SEQ ID NO: 475 - DNA, 20 bp, synthetic construct
  source 1..20: mol_type = other DNA
gggatcctccgatgccaatg

SEQ ID NO: 476 - DNA, 20 bp, synthetic construct
  source 1..20: mol_type = other DNA
ctacttagaagctgaaacgt

SEQ ID NO: 477 - DNA, 20 bp, synthetic construct
  source 1..20: mol_type = other DNA
ccacgtttcagcttctaagt

SEQ ID NO: 478 - DNA, 20 bp, synthetic construct
  source 1..20: mol_type = other DNA
ggctccttaccttgttcaga

SEQ ID NO: 479 - DNA, 20 bp, synthetic construct
  source 1..20: mol_type = other DNA
tgaacaaggtaaggagcctg

SEQ ID NO: 480 - DNA, 20 bp, synthetic construct
  source 1..20: mol_type = other DNA
cctacttagaagctgaaacg

SEQ ID NO: 481 - DNA, 20 bp, synthetic construct
  source 1..20: mol_type = other DNA
ggggtccgactatgctggtg

SEQ ID NO: 482 - DNA, 20 bp, synthetic construct
  source 1..20: mol_type = other DNA
tgacaccacaccagcatagt

SEQ ID NO: 483 - DNA, 20 bp, synthetic construct
  source 1..20: mol_type = other DNA
caccaactgaaaacagcact

SEQ ID NO: 484 - DNA, 20 bp, synthetic construct
  source 1..20: mol_type = other DNA
tttctggggtccgactatgc

SEQ ID NO: 485 - DNA, 20 bp, synthetic construct
  source 1..20: mol_type = other DNA
tctttgaatttcagcaccaa

SEQ ID NO: 486 - DNA, 20 bp, synthetic construct
  source 1..20: mol_type = other DNA
gtggtcctattatgttgatg

SEQ ID NO: 487 - DNA, 20 bp, synthetic construct
  source 1..20: mol_type = other DNA
ccatctgacattgggatcca

SEQ ID NO: 488 - DNA, 20 bp, synthetic construct
  source 1..20: mol_type = other DNA
catggatcccaatgtcagat

SEQ ID NO: 489 - DNA, 20 bp, synthetic construct
  source 1..20: mol_type = other DNA
tccacggctgtttctgaaca

SEQ ID NO: 490 - DNA, 20 bp, synthetic construct
  source 1..20: mol_type = other DNA
aggacacttgattctgtcac

SEQ ID NO: 491 - DNA, 20 bp, synthetic construct
  source 1..20: mol_type = other DNA
tggaccacatggctttgctc

SEQ ID NO: 492 - DNA, 20 bp, synthetic construct
  source 1..20: mol_type = other DNA
acgtactccaccactgtcac

SEQ ID NO: 493 - RNA, 20 nt, synthetic construct
  source 1..20: mol_type = other RNA
ctgtcaccaggcattgtgtc

SEQ ID NO: 494 - RNA, 20 nt, synthetic construct
  source 1..20: mol_type = other RNA
tgtccttgcaactctcacgg

SEQ ID NO: 495 - RNA, 15 nt, synthetic construct
  source 1..15: mol_type = other RNA
accaggcattgtgtc

SEQ ID NO: 496 - RNA, 20 nt, synthetic construct
  source 1..20: mol_type = other RNA
gtagtagcagtcctgtaccc

SEQ ID NO: 497 - RNA, 20 nt, synthetic construct
  source 1..20: mol_type = other RNA
cattatggacagagttaccg

SEQ ID NO: 498 - RNA, 20 nt, synthetic construct
  source 1..20: mol_type = other RNA
aggacactcgattctgtcac

SEQ ID NO: 499 - RNA, 20 nt, synthetic construct
  source 1..20: mol_type = other RNA
cacaactcccacagtggccc

SEQ ID NO: 500 - RNA, 19 nt, synthetic construct
  source 1..19: mol_type = other RNA
aggacactcgattctgtca

SEQ ID NO: 501 - RNA, 20 nt, synthetic construct
  source 1..20: mol_type = other RNA
ctgtcactggacattgtgtc

SEQ ID NO: 502 - RNA, 20 nt, synthetic construct
  source 1..20: mol_type = other RNA
aagtgtccttgcgacgtcca

SEQ ID NO: 503 - RNA, 20 nt, synthetic construct
  source 1..20: mol_type = other RNA
ggagcaaagccccacagtcc

SEQ ID NO: 504 - RNA, 20 nt, synthetic construct
  source 1..20: mol_type = other RNA
gttggtgctgaaattcaaag

SEQ ID NO: 505 - RNA, 20 nt, synthetic construct
  source 1..20: mol_type = other RNA
ggagcaaagccccggggtcc

SEQ ID NO: 506 - RNA, 19 nt, synthetic construct
  source 1..19: mol_type = other RNA
ctggaactgggaccaccgt

SEQ ID NO: 507 - RNA, 20 nt, synthetic construct
  source 1..20: mol_type = other RNA
acagagcttccttctgaaga

SEQ ID NO: 508 - RNA, 20 nt, synthetic construct
  source 1..20: mol_type = other RNA
atgccagtgtggtgtcatag

SEQ ID NO: 509 - RNA, 20 nt, synthetic construct
  source 1..20: mol_type = other RNA
accacagaatactacccaaa

SEQ ID NO: 510 - RNA, 20 nt, synthetic construct
  source 1..20: mol_type = other RNA
ggagccagaataacattcgg

SEQ ID NO: 511 - RNA, 20 nt, synthetic construct
  source 1..20: mol_type = other RNA
ctagaggctttttttgaaca

SEQ ID NO: 512 - RNA, 20 nt, synthetic construct
  source 1..20: mol_type = other RNA
cagatgctgagattagtcct

SEQ ID NO: 513 - RNA, 20 nt, synthetic construct
  source 1..20: mol_type = other RNA
tggattcctgcagtagttcc

SEQ ID NO: 514 - RNA, 20 nt, synthetic construct
  source 1..20: mol_type = other RNA
tgacaccacattggcatcgg

SEQ ID NO: 515 - RNA, 20 nt, synthetic construct
  source 1..20: mol_type = other RNA
acatgttcttcctgtgatag

SEQ ID NO: 516 - RNA, 20 nt, synthetic construct
  source 1..20: mol_type = other RNA
catagatgaccaagattgac

SEQ ID NO: 517 - RNA, 20 nt, synthetic construct
  source 1..20: mol_type = other RNA
tgataccacactggcatcag

SEQ ID NO: 518 - RNA, 20 nt, synthetic construct
  source 1..20: mol_type = other RNA
ccatcactggacattgcgtc

SEQ ID NO: 519 - RNA, 20 nt, synthetic construct
  source 1..20: mol_type = other RNA
aactctcctcacaactccca

SEQ ID NO: 520 - RNA, 20 nt, synthetic construct
  source 1..20: mol_type = other RNA
ctgcatctgagcatcgtgtc

SEQ ID NO: 521 - RNA, 20 nt, synthetic construct
  source 1..20: mol_type = other RNA
cgtccctccgaatgttattc

SEQ ID NO: 522 - RNA, 20 nt, synthetic construct
  source 1..20: mol_type = other RNA
aaacagccgtggacgtcgca

SEQ ID NO: 523 - RNA, 20 nt, synthetic construct
  source 1..20: mol_type = other RNA
tgaacaaggtaagaagtctc

SEQ ID NO: 524 - RNA, 20 nt, synthetic construct
  source 1..20: mol_type = other RNA
acagaggctccttctgaaca

SEQ ID NO: 525 - RNA, 20 nt, synthetic construct
  source 1..20: mol_type = other RNA
gcttggaaccggggccactg

SEQ ID NO: 526 - RNA, 20 nt, synthetic construct
  source 1..20: mol_type = other RNA
acaacagaatattatccaaa

SEQ ID NO: 527 - RNA, 20 nt, synthetic construct
  source 1..20: mol_type = other RNA
ctatgacaccacattggcat

SEQ ID NO: 528 - RNA, 20 nt, synthetic construct
  source 1..20: mol_type = other RNA
aataacattcggagggacga

SEQ ID NO: 529 - RNA, 20 nt, synthetic construct
  source 1..20: mol_type = other RNA
tattctggctccaagcctag

SEQ ID NO: 530 - RNA, 20 nt, synthetic construct
  source 1..20: mol_type = other RNA
gtagcagtcctgtaccccgg

SEQ ID NO: 531 - RNA, 20 nt, synthetic construct
  source 1..20: mol_type = other RNA
agtagcagtcctgtaccccg

SEQ ID NO: 532 - RNA, 20 nt, synthetic construct
  source 1..20: mol_type = other RNA
tagtagcagtcctgtacccc

SEQ ID NO: 533 - RNA, 20 nt, synthetic construct
  source 1..20: mol_type = other RNA
tggaccacatggctttgctc

SEQ ID NO: 534 - RNA, 20 nt, synthetic construct
  source 1..20: mol_type = other RNA
acgtactccaccactgtcac

SEQ ID NO: 535 - RNA, 19 nt, synthetic construct
  source 1..19: mol_type = other RNA
gagccagaataacattcgg

SEQ ID NO: 536 - RNA, 18 nt, synthetic construct
  source 1..18: mol_type = other RNA
agccagaataacattcgg

SEQ ID NO: 537 - RNA, 17 nt, synthetic construct
  source 1..17: mol_type = other RNA
gccagaataacattcgg

SEQ ID NO: 538 - RNA, 16 nt, synthetic construct
  source 1..16: mol_type = other RNA
ccagaataacattcgg

SEQ ID NO: 539 - RNA, 15 nt, synthetic construct
  source 1..15: mol_type = other RNA
cagaataacattcgg

SEQ ID NO: 540 - DNA, 57 bp, unidentified
  source 1..57: mol_type = unassigned DNA
aggaaacccccggggtacaggactgctactaccattatggacagagttaccgaggca

SEQ ID NO: 541 - protein, 19 aa, unidentified
EETPGVQDCYYHYGQSYRG

SEQ ID NO: 542 - DNA, 132794 bp, Homo sapiens
  source 1..132794: mol_type = genomic DNA
gtaagtcaacaatgtcctgggattgggacacactttctgggcactgctggccagtcccaaaatggaacataaggaagtggttcttctacttcttttatttctgaaatcaggtaagacatagtttttttaaattataagaattattttttctcccacaatgtagtaaaaatacatatgccatggctttatgtgcaattcatttaatttttgattcatgaaattcccagttcaaaatcttgtatatgattgaaaaattcttaaaaaaataagtttaatttccccgtgaagactgtcacggtgctggaatgaatgggcagaaaaaataatggttgatttttctaatctaaaagagtgtgcctacatgatggccagtctggctgaaaaataaatagccattgtagctaactatgcaaaggatggctaagctcttcgcttggttctcagtttcattaatttatatcatctctgttcaggtgccatgctcccctcactagcaagttgaaacaatgaaataactctttgaatatgtttggttccttgacctgttcatggagtgggactcagcatttctctctttgttatggcctgagtaaggctttccatcggtatacatttgcttcttatccctggagaaattatacacatccatttgccagatgatatacgcatataatgattcaacaaatactcagggtatttgttgagtgggttaggtccccacatttttatacatacatacacacatacacaccgtgtgtgattgtgaatgtaagtgtgtgtcctttacaaatactagcttatttagctcatggtataggtagggtagcatagtcatccccattttataaacaaagaaatctagacttaggaaaatcatgttatttgtctcgtgaccaaattcccaaatcaaggaaataaagaaacctggatttaagccagatttccaagaaaaaatctagggctcttctcactttttcatctttgttccaacatttgaaaaaataaatctaaacacattccaatgtaactgaagagcaggttaattgtttgccacttgcagaatccaattaagaagagagaagtctggtataaagaaagtgatttgcttccaaagctagcttaggggaagaaatgcagcagtcctgccgtactacttcactttaggagcagaaagtggcacttttaaaaggcaacagaggaggcgagcaaggattcaggggtccatgctagcttgggcaccttatccaccaggtagttgagcagttgcctgctggtgcctttgtgagcagggtgttgtcccttgaggcaaatctctggagggtgagagttttgtagtgggcatgctttggtttataaatcacctgtgaactcaggagttccatcttgaagcacatacatagttagatgaacttgccctgcagggagagtctgatgaaagggaggtagatgcttgcaatttaatctataaattaccagataaaattttacaagttgactttaaagtcaaacacatttgaatttagtggaagccattcaagaaaatatcaaagaaaatacagagcaggagaagattaagcaaagagttttttggggaaattggtgtctatgtctgtgtgtgtagggagtgcaggggatatgaatattctatttcagcccatggaaactaggatgtagatcactgtgaacttattcagcaggctacacccaaaggctagaacaaacttctctgccacaggattaacatatgttttaatcgacctggggggcacattctctgataagctcttttggaaagccaggctttctgtggacgtgttatctttccaatgtgtgctggaatgcccggggagaggaaaaagtttcttttacagccatgctcagtgagaagcggagaaacatcttctattcacaaattgctaagtcttttacacatgcaaatatgcatacacattcacacaccacagtgaggaagaaattctcacaccattaataaaatacatttacttcagtagcaatatacatctacattttgcctataatataaaagtatttttcctattaaaagatttgtttaatgtttcttcaccaacaaataaaccctattaaatccccattgccatatgagccctggaggtgaatcagagaaacaaaaggattgtggaaaaatcatcaggttaaaaaaagaaaaattgattctgttttgggatatttcctagcaacatgagctggggaggggatctcagcagtgatgctctatgaagcataataaaatgacacagttacaggtaacttagttaaagggggaaataaatggaagtttcctctttttgaatatcaattgtagcctgctctgctacatttcaaaaacactcttcaaaatgtttaactgaactcactgtaggaagcaccttattaatttattgtgtgttttgaagtcacactgtgagctatagaatttacccaagcacaactcttcctggaaaagagagttcaaatgagaaacagtgcggggtgaagacatggatatgggcctaaaatatctatttctcaatgatattttgatatatctatcaagtgctttttagtggattaggttcagaatgcatcagccaatgcctgttcaataatccagttttccagcatagagcatattaaattgaggaaggacaaagtcacagaggtggggagcaggtggactgtggccaaggactttgcatgaaacagtgagcgtgcatcctcctccttgccctgccctcatggtctgtgtactctcaggaggtcaggacaggcctttctgagaatgagaatctgttcatctgcctttctactggatacttgtcatcggcatacaaacacatgttctctgcagtgtgtcatctttcagaacctcccctgaccctgtattccctagaagtctcgctgctttcagagccaggcttctctcctgctgccacccccactgctcttctagtcactctttaacccactccatctgcatgtggcccccaccacacccctcaaagtggtcaaggttgtcctgttgcttaattccatggaagcttggctatcttcattttattagcctcttttggcctctcaccctgtgaaaatcactacattttgtgccagagatggagctggcatctccaggcttggaagagggctgctgaagctcagccaggtgtcctaaggagcctcaggacaggggatgctcagtagccttgcaatgggaacacagctgagccccacttggccaccctttgccacaaccaggcagaaagcagcttttgaacagatttgttgcctcagatttgatctcaaagaaaaatcgtgggcagtattggtcccaggttctgcttttttacaatttcctctgaaatctggatgcctatcaacaccttggaaaaactgaattctccccaactaatagtggtgtgtcactgtagtaagcctagtacaaaaatggccttctttgtggaggagcttcatatcctccattttttttttgcttaatttttgcccaagatgagaacataatttagttcactttttatttattcccaacatcatccatgcaccaacatttttgtaactaaaggagggaccattcagaagatgcttatcaactgtcaaagtgacagtgttacaaccaatgcacatattgtaagaaatcaaacaatggcctccaaggttcatttctacacagggattagcagatcaacatcaatcttggcaacacagttgccactgatggtgtcttattttttttatcatgacatggcaatcaagagcaaacatgatttattcttatttaagattttatggttagactaggcagatagctagatatgagcaggaggtggaagcccctgagagaatggaggtctggagaatctgaaaccccagagattacccaagtcctgcatgctagacatgagtggaggagggggaatacctaggtagaaaagaatgccccttaagatgcccagcagtcgctcactgtgcagttaacttttcagaatgctgctagatacatgctgatagggagggaagagggcaaaggagaaattcctaagagatacacggttgcagttagtatacatctgagtgctatacaaccttctttgggtggtggcaagaagcaatgcagccattacgtagaattcatatcaaacacctgtatcacaggtgttaaagaaacaagaaacattgtacttcttgtattcttaataatgatttgcaatattgtctttagtatcactgcaaacctctataaatatgatttttaaaaagtatttctttaggttggaattacttctacgcattgacttatcttcctgggtttcattagccgtacccgttgtactttcttccttaccactgtttatctcaaactcttgagattaaagtatgggctcaggagggagcgaggagcttcaggactctcacggacctccagcacagtgtagctgccttatggaaaagtggccacactgttttctgcactggtccctgcccctactattcctcactgggcagagcacagccaccctggccctgcctgaacattttagtcagtgttggctctgtgcttctctggggaggaaatccaagagacaacccacagcccctctgccatttcagctgcagcagtaccaccgttaatgcccttgggcttgagaaagaagggacctggccacttccctgacacctccagcacacagcagggaaagaattccagtttctctttcttgtgagctttcacctgctactcttcaccaggcaaggctcctggcttgggcccacagtgcaggcacctcgaactcagttgaacatttccactggctgcactctgtgtttttgtggggtgaagctcccagaggtgactgaaagtccttctgccactaacactgcagtcatactgcccttgctgtacttggactagggaaggaaaaaagatcctgagtgctttactcacaccccagtgtgccccagccaccctatggaaaagaggccagtgtgtcatccctgcaagcaccctgaggcccctgcccctgctgcccccaagctgtagagccagaatataaagctggcagaaaaatgtaaaaaggctagactggcttagcctcccagcctacatctttctcctgtgctggatccttcctgctcttgaacatcggactccaagttcttcagctgtgggacttggactgtcttccttgctcctcagattgcaggtggcctattatgggaccttgtaatcttgtgagttaataccacttaataagctcccctttgtgtgagtatatctatatctatagatagatataggtatactcactatatatacacatatatacatatactctctctctctctctctcatatatatatatatataatctcctattagttctgtccctctagagaaccccgactaatacagattttcataccagaagtggttcttgaggaacagaatattaaggatggaattctttcattggttttgggacttctggtgttggctgattaatatgattagaccaaaaaatgctaaggactctacttctaatagtatggagaacactgatagtacttggcctgaattgtttagagagttatgcaaaataaatgcatttgacactactgattcatcacttatgagaggcaaggagtttagtgactctatacataatacctttgactatatgtggagaaccaaggaacataatgaagttggttgattgctcctaagttctctggagaaagagatgaaagaaaatgatgatctcaggggatctgtctcccaccttcagaagcagatactgagccacaaatctgctaagattgccctgaatgagagttttaactcctgtagagaaagagttgaaattgtgaaaaaacagagacaagctgttatcatgcgagtagctgatctgcaacaagaggtgcatgcacagccttgccaggtgtttactgttaaagtgagggcattgactggaaaaaaatgggaccctggaacttggagtggggatgtgtgggagaaccctgatgaagctgaggacactgagtttgtgaactctgatgaaacttttttgccagaagaaacagtttccccatccccagtagtggtaacatcccctccctgacccgtgctgccattagcctttccacctttgtctgaggatgtaaaccctgcactgcttgaggcaacagtgatggccttccctgaggcagctgccaggcaagataatgttgattctcctcaagaggcacccctaatgcccctgaatgcttctagacctataactaggctaaattccttgcgggccccagaggtgaggttcagagtgtgacccatgaggaggtgcattatactctaaaagaactgcttaagctttctaatttatattggcagaaatctggagaacaggcatgggaatggatattaagggtaagggataatggtggaagggacatagagttggatcaagctgaatttattggtttggccctactaagtagggattctgcatttaatgttgcagctcggggacttagaaaaggttctgatagggccgggagcagtggctcacgcctgtaatcccagcaccttgggaggcgggggcgggcagatcacgagatcaggagattgagacaattctggctaaaatggtgaaaccccatctctgctaaaaatacaaaaattagctgggcatggtgatgcgtaactgtaatctcatctacttgggaggctgaggcaagagaactgcttgaacctgtgaggcagagattgcagtgagccaagatcgccccactgcattccagcctggtaacagagcaagactccatttccaaaaaaaaaaaaaaaaaagttataatagtttatttgcttggttagctgaaatatggattaaaagatggtccaatgttagtgagctggaaatgccttggtttaatgtagaggaagtgatccaaaggcttagggagattaggatggtggagtggattagtcactttagacctactcatcccagctgggagggtccagaagatacacccttggccgaagctttgtgaaatagatttgtgagagcagcacctgtatttttgaagagcccgtaattgctcttctctgtatgtcagatctaacagtaggaaccacagtcactcaactacaaaatttaaatacaatgggaataattggatcctgaggtggcaggggccaagtgttggcactgaaccatcaaaggcaaggtgggcataactaccataatagacagcagaggcaaagcagccatcagaatagtctgactcatgtagagctctggcattggctaattaatcatggtgttcctagaagtgaaattgatgggaaacctactgtattcctacttgatttatataaacaaaaaactgccaggtagaatggactaaagactaatctgaattataaaaacagagaatcatgggccctcaatcaatttccagactcgaacctgttacagttccagaacccactgaatgaaggggaggctggatccccttgaggaaggacaccactaggctactgacaacttatgctgttactctttctcccatccttccctaaggagacctctggccttttaccagggtaactgtgtgtactggagaaagggaagtaatgagacatttcagaaagtactggacactggctctgagctgacgttgattccagggtacccaaaacgttattgtggttccccagttaaagtaggggcttatggaggttaggtaattaatggagttttagctcatttctgacttacagtggttccagtgggtccctggacttatcctctggtcattttcccagtgccaaaatgcataatttgtatagacatacttattagctggcagaaatgccacattggctccctgactggtaggatgagggctattatggtgggaaaggccaaacagaagccattagagctgtctctacctagaaaaataaaaaaatcaaaaacaatatcccatccctggagggactgaagtgattagtgtcaccatcaaggacttgaaagacgcaggggtggtgattcccaccacatccctgttcaactctcccatttgacctgtgcagaggacagatggatcttggaaaatgatggtggattattttaagcttaaccaagtggtgactccaattgcagctgctctaccagttgtggttttgttgcttgagcaaattaacacatctcctggtgcctggtatgcagccattggcttggcaagtggctttttctccattcctgtccataagacccaccagaagcaatttgccttcagctgacaaggccagcattatacctttaccaccctacctcaggggtgtatcaactctccagctttgtgtcataatcttatttggagagaccttgctcgcttttcacttccacgagatataacactggtccattacattcatgacattatgatgattggatacagtgagcaagaagtagcaaacacactgaacttattggtgagacatttgtatgccagaggatgggaaataaatccagctaaaatttagggactttctacctcggtaaaatttctagggttccagtggcatgagacctatggagatattccttctaaggtgaagcataacttgctgcgtttggcccctcttacaaccaagaaagaggcacaatgcctggtgggcctatttggattttggaggcaacacattcctcgtttgggtgtgttactctggcccatttatcgagtgacctgaaaggctgccagatttaagtgcagtctagaacaaaagaaggctctgaaacaggtccaggctgctgtgaaagctgctctgccatttgggccacatgaccccgcagatccaatggtgcttgaggtgtcagtggcagatagggatgctgtttggagcctttggcaggcccccataggtgaatcacagtggagacctctaggattttggagcaaggccctgccacttctgcagataactactctccttttgagagacagctattggtctgttattgggctttggtggtaactgaacgtttgactgtgggtcataaagtcaccatgctacctgaacctgcctatcatgaactggttgctttctgacccatctagccatgaagtgggtcagcacagcggcatttcatcatcaaattgaagtggtgtgtatgtgatcgggcttgagcaggtcctgaaggcacaagtaagttacataaggaagtggctcaaatgcccatgttctccactcatgccaccctgccttccctcccccagcctgcaccaatggcctcatggggagttccctatgatcagttgacagaggaagggaagactaaggactggttcatagatggttctgcacgatatgcaggcaccacccgaaagtggacagctgcagcactatatccactttctaaatgcatgtgtacacttgtgctaagaaaatatctttattttatttcctttatttttcctttatcatgtgaccttagatttatggacttcacatcagcatttaagcatttaagtgttgttcatatcagcatttaaatattgttaaccttatgtaataacttttggtttggggattggtgcgtttctggttgtatgaggatagttgtattatattaggcataattatgaccttattattgtctttatttgaagattatgtatgatttcaggatgtgtgtatgggttcaagttgacaaggagttggacttgtgatggttaatactgtcaacttgattggattgaaagatgcaaagtattaatctcggttatgtctgtgagggtgtggcaaaaggagattaacatttgagtcagtgggctgggaaggcagacccacccttaatctgggtacacaccatctaatcaagttccagtgtggccagattgtaaagcagggagaaaaatgtgaaaagactagactgaattagcttcccagcctacatctttctcctgtgccaaatgcttcctgctcttgaacatcggactccaagttcttcagcgttgggagttggactggctttcttgctcctcagcttgcagagggcctgttgtggaaccttgtgatccgctgagttaatactacttaataagatcccctttatatacatataatatattatattatatataatatatataatatatattatatataatatatataatatattatatattatatataatatatattatatattatatataatatatattatatataatatatattatatattatatattatatataatatatattatatataatatatataaaatatatatatatcctattagttctgtccctctagagaaccctgactaatacaatttatgtcattaatctcatttattgatttgtatacattgaaccaaccttatatcccaggaataaaacctacttgattgtggtggattagctttttgatgtactcttggattcaattgctggtattttattgagaatttttgcatctgtgttcatcaaggatattggcttgaagttttctttttttgttgttccatatcagaatgatgacgacctcatagaatgagttagtctgtcctcttttatcttttggaattgtttcaggaggcttgatatcagctcttctttatatgactggtatactttggctaggaatctctctggtccaggggtttttctggtgtaggtttttaattactgattcaacttcagaactcattactcattattgagttctaaaactcactttcatgtactcttcaaaagactgtcttcttctgttgttgagcggggtgttctctcaaggtcgtttaggtgaaggtggttgctggtgttcttctgtatccttactgcttgtctttctctttttttattgactactgaggattaatggtgatgtgtccaactttaactctagattagtctatttctcttttagattgtaactctgttttatatattttgaagctctgttgttaggcatgtgtatttggattgttaggtcttcttgatgatgacctttatcattatgtaatgtttcttcttatctctggaagtattcgttgttctgaagtctatttgtgctgatatgaatacagccttcacagctctattttcactagtatttgtatatctttttctcagcttttaaattgagatgttcagaccatttgcattaaagtagttgttaataggattaaatttaaatctaccattaagttggttatttctctttgtcccatttaaactttgttccttttttcatatttttctgccttcatttatattgagtttatctccacgacttacttattaaattaatttttaatggttttagtattttccacaatgtttataatatatactttgattttttcacattccaccttcaaatgacagaattatactggatatatagaaatcttacatcattgcacttctccttcctccctctcaaaatgttgtgctattgctctttgtaatagaggcttacttctattatgttatagctctcataatacattgacactatttttaccctgaataatcagttgttttttaaagtgattatgactacaaatattttgaataatttctttattttaccatttctggtgctccttatcttttacagtagatcccaatttccatctggagtcacattctttctgtgaaaaacaacctttagcatttcttatagcacgggactgctgttgctgttgtctttcagcttttctttgtctgaagaagtctttattttgccttcagtttttaaaagtgattttgctgagtatagatactgggttgagagtttcattccttgtatcattttaacaatgatgttccattatattccgttttgaatagtttctgactagaaatctgatctttgtttctttgtattcaatagttcctttttctctgactgcctttaagatattctcatctttgtttttcaacagtttgactataatttgtttattattaactttttgtatttattctgcttgaggtttcctgagctccttggatttgcagattgttgatttttattgtttttgtaaaattcatagccattatctattctactgttttgttttttttttcacttctctctctctgtattcttctttttggactgtaagtattcaaatgttagatcattcatattgcttcataaaccttatatgcttcttctgcttttttttttttgtcaggaactctttttttgtatctgtgttggtttggataagttctagtagactatgttcaagtttatggattattttgttagttgtgtctaattgactcctcagtgcattcagagaattcttcatctctgatattataaatctcttcctagcattttcatgttactcttttctatagtttccatctctttgctgaaattctccccctatccatggatattgtccacctttaccacaagattctttaacatattaacataggtatcatacaaacccaaactgatagtttccagatggtgtcttttctgagtctgtctgtcttgattgctttattatttaacagtgacttatcttccctcttcagcttttggtgtgtcttgtaattgtttaatcaaacactgggtatcataaatggaggaacagtagagattgcagtaaatattatttatgctttgaaatgggcacccatcttctgttgaaaatatgttttgtggtcaattgagtcaacctagtaactggttgaactgaatttggcatttgtgcttgttgcttttatcttaaatgcaccacaggtttaaattcctccagtgatgggttgctgctatcttttgcttagagtggggcctggggtgtggaagaattttctcagtgttcctatctattattagattttagcagtcactgcatgcctgcactacagaggggatatcttcatacacataatctaaccccattgaaactgctgtttcttcttaatgaatgctcaatctttggtggaaataaacaaatgctgtatctcctggagccacttcagtcttagtcaggttctgcagggctttgaagggaatgcattctcagtattcttgtgccttatttggatggaacttgaacctgtggtgggtttggagagaaagagtagcagacgtctgctatgttgcaatgcaggatgctgggcacaagaaaatttccagtctctcctccaaggaaataagatttgatcatctacctatccctgagaagtgaagggctttgcctgcggtgctagatgcaaaaccatttttctccccccattgcccagaaacttaaggctttggcttttctgagcagtggtctagggaattgtgcaaggttttcatatttgaccctgacagcccatcaccacctacagcttgcagtgccaaatgtatctccctctgatctctcctgtcctgtggtcctcatgaacattaagaagagatttctaaaaaagagcttgcacatgagcatagtttctggtgagaagaattctgatatgttaacttcctctaaacttttaaataaaatatttctaagaattaaataaagttctagaatgatatgaatctattcctttggttttttgcacgtctgtctgcctgctaatcaagagaagagaatggtcgtaattctcagagactttttcctgtttgtgtcataaatgacttcacatttttttctgttctaagaactattcagcttgatttcttctgttttaattttagcagcacctgagcaaagccatgtggtccaggattgctaccatggtgatggacagagttatcgaggcacgtactccaccactgtcacaggaaggacctgccaagcttggtcatctatgacaccacatcaacataataggaccacagaaaactacccaaatgcgtatgtcattaatcttacagtaagcaaaacaaggtccaagtaaaatttgtcttagaaaaggtgtgcgtcaagctaacttcttatgattaaatttttctcacacatagaatgcatggcaaaatgtctgagaaacattactttgagcaaagagtatgatagaagagaaatgttaagctggctctctttcctgagagtttgataaaatcaggagaatatctggcggtggtgaggccacaataatggaaaatcagaatgtttagacagagtcagcttcaacaacactcactaaaggtcaatgtgatctttaccccttgaaattctataattctaatctccaattcctgaagtgaaggttgtgttggccttttctgtcttggctcacaagtaaatgatatgtgcatatctatggaaaggcgaatctatctttttctatatctatgtctattccaacgggtagaaacaccctgggtcctgagcaccagtggtctgaaggaatacgggttgccaggaagagagaagcaaaggcaggaaggcagatgaaagtaagaaatgagacagatgctaaacaataaaaagtgcgggaagatagacagaagctggggtctgaccacaccatggccagtctttcacacataagtgactaccaaagacaagaaaaaatgatttccgcttgttggacaatagatggtagaggaccaagggaattgcgagagagagaacaatgagatcaactcaacagatgcactggttttcttcctggagacccttcctgcactgaagggcaggagatggagcccaaaaaaaactgtagccatcttgctgaacagaggagggacattggagtttgggattattcaggtggctaggattttctaggcctgctaacaatgagaacagatttgtggaggaaaggagttctagaaatatgcatagaaatctcctcgagtcattggctaaacatgaagctgcatgtacacagaaaatagatccacaagaaagtagggcaaagaacatctacggaagagcagcaactacaatggaacagtgagctcaataaacatgacagagctcaaatagcactaagggatattggagtttggaccacacagaggagagagacttcactgaacatcttgggcattcagtagagacccaggaaaagccatactttaggagtagaattagtatattcttagaataaaggcagctccacacaaacaatagcaaaactgaaaaggaagtctccaagcatcagaatgatgtccaagtcaatgaactgcctctgagaggaaaactcaaccatctttagaggtaaacatcaaagtcaagtggctcagctatgcagtatccacagtgtgaggcctaaatataaaacttgactacacatagaaaccttttagtgtgacccacaagcaggaggaaaatcagccaatacaaacagacccagaagagacagaaatgattagaatggcataaaaatttgacatatcactatataataattgagttctaggatttaagaaaacatgaatatagaatgcaacagacaccttatccagagacagtaagagtataaagagccaaatcgaagaactactaagagatatgtcttaaatgaaaaaattactagatggcctccccatctagttagacatttcagaagaaaataccaaatgaaaaataattgcatagaacctacagaaccagatacacacatacaaaacacacgcatgcatacacacacactcaaacatgtataagcttacaaacacacacacacatccacaaatgctgaaaaatgaaatcaaccgagccacacagacataaaggaaaacataaaaagatttcctacatgtgggaagcaagtcacagaaagggggaaggagattggaacagaaatatatactgaaagcaaggatggctgaaaattttccaaatataaagaagattaaaaaatcacggactcaagaagctcaatggatcagaaaaataatttctaaaatgacaattataggatgccactgggtacatagcagttcaactgtcagagggcaaagacataatacacagaaaaatctcgtaaggaacgggaaaaacaaaaagctgtgtcttgctagaggaacagtgatacaagtgactaatgtgttcccatcagaaacactgcaacctggacacaaaagaataacattaaagtaataaacgtaagaaagaagagctcaactgagaaggctacatccagcaataaaatgccttgaagttcatccatgttggaggaatgcacattgtgcactcccctaaacaaagaaaccggaaactgtaagactttggaatcagcaggcttatgtaacaaaagaggtgaccctaaggaattaaggagaagaagaatagaacaagaagggaactttctgcagcctatataatgaagaacctagcaattggcaaatgtagatgaaaatgctacatgttttcttgatcaaacgtttatatctttttaaatgagagttgacgagttgaagcaaaatgataccaatatatttaactttaccatatgtagaagtaaaaatttgaacatgtagcataaatcatgtagggattaattggaagtgtaccactgtaagtttcttacctcatgcacgatagtatgtaatactaataaaaggttaatgtgtgggttcaaagggatattgcaaatcctagagcaatcacaaagtttttaactctgaggtttgttgtataataacaatattttatgtattcaaaagagggaagccaaggaagaaaaaaaagtctttaaagagctctggctcttagtacatccagttgctcattgaatgagcttcctggaatggagggtctgggactgagactaggccacatgtgtagagccactagagacacaatgttggatccccatggcccataatacatttcccattttctcaggcagccacaggtcatgaatgtgaggatactgagaggttggagcaacgttcttgggaggcataaggaagagcgaatgcttcaagatccccgcagcccaaactcctcagctgctttgcctcctaattcattgttttttgctcctccatagctgtccgacctcttcagatctcttagtcttcctgccatcttcctttatgccatgggacccactgttctttcaactcatcccccagttctggagtggctgtggacagcagaggatagactgagagcaggagagaaggtcctgcccaggaacccattctagagatactgcattctgcctgggagcaagttttccagggcagctttgagaagtcttgcagaaacaaacctacttgaccgacatgatatgggaatgacagacagtaatactatttgcacaatgcttttccatgggaaaggtagagccttttcactaggttttgagtacatggagtgtgagagttgacctggaaaggttatcctccttgatgccatgttttctctgaagaactacatgttcgttgcaactcccacattagaatatgaagtcctaccgagagagatacggagactagacagatacagatgcatttgcatgtgaatacacaatcccacaatacagacgtcaaaacccataccagttattccagagagatggattgggcagaaggcagaaggagaatactctgatcgtttttcggccacgtgtgtgtgttatctcagtgtttctaagaagcgtttgctactttagattttttatttaaaaaaaatagtaataatctattaagtatgagagatgtgcagagaggattagtgatcgagagccatttttgctggtggcaatcatatggtacttttaatgggaatattagaaaggcaccggtaatgaccttgttgcagcacaaaggagagagtgtggggtgcccctgcatgttgtcccacctcttgtgacgtgtatcgttttggaatttccagtggcttgatcatgaactactgcaggaatccagatgctgtggcagctccttattgttatacgagggatcccggtgtcaggtgggagtactgcaacctgacgcaatgctcagacgcagaagggactgccgtcgcgcctccgactgttaccccggttccaagcctagaggctccttccgaacaaggtaaggagtctgtggccagacatctacacgcttcgatgctgggatgaaaagccatggaaattcccactgatgcagccgccttcaatggtaaacggatgctcgagtgttgcctgagttctaccatgtaggaggaagcctccgtgcactctctgggggagccagcggagtgatttctggtgcaacgtggttgggctttgtctttaggatgggcacaaaccctccagggggatcgacttcaaaattcaccttgttgtaaaacgggctacctcagtgtcccagccaaaatttttattgtaacatgctgtcaggtgtgtcactctttccaagccagtaagcttttccggggatttcttcaagtagccagcattcagagcaatcttcagcattgcagattctgagaaatgtggctctggagcctgtcaccctcgagaaacctaagagggctgcattgattccatgtggccctgggtctatggagcagtacatgagctcccagtgctctaaggctcttcagccctaggctttgaagggagtgatttctcagtattcttaaacctctttctgatgacacttgtacctgtgaggggtctagagagaaagagtagtagactcctactttactacaattcaggatgcagggcatgagaggattccctctctcctccaagggaagaagcttttggcgtgcacacatccctgagaagcaaagtgtctttgtcttcagtcagatacataggaccgttttctgccccatggcccggaagccaaaggccttggctttcatgatcaacggtctagggaaacatgcaaaatttccatgtctgtcccaaactctgcccccgacagccaattaccacctgcagcccgcattgccaaatgcggtgccgtttgcatgaagattcagtagagtttcctagaaaggtgctacctcgtgagctcactttccaatgaggaatctgatctgttgtgtttctctaaggtgtcaggtgaaatatttccaagaacttactacagttctagaatgggaggaatctgttgctttggtgtttgtttgttggtcggttttctcacatccatctgcctatggataaggaaaagagaacggtcgtaattctcatagactcctttctggttgtgtcacaaatggcttcacatgtttctctatgctcagagatactcagcttgatttcccgtgttttcatttcagcaccgactgagcaaaggcctggggtgcaggagtgctaccatggtaatggacagagttatcgaggcacatactccaccactgtcacaggaagaacctgccaagcttggtcatctatgacaccacactcgcatagtcggaccccagaatactacccaaatgcgtatgtctttgttctttaccataagagaagaaagggccaagtgaagtttctgttacaagagatgtgtctcaagctgagttctccgaactcaacttgtgacagatgcagatggcgtagcaaaatgtctcaggatgattgccttggagctaagggtctgagagaagggaaatgttaagctccctctccttcctcctagttctattgagcagaagggaaatctggaggtgaggagatcacattatgaagaaagtcagaatgacaaaggaccagacacttagattacccttccacaacaccaactaaacgtcaatggagactttccagttggaattccgttattctggcttccacttcctgaagggaaggttgcgtttgccttttctctctgggttcaagaggaaagaataggtgcttatttatggacaggtgaattgatctgtttctatatctacgtatattccgattgtcagaaaaacactcgttcctaagtaccagtggcctgaagggatacaggttcccagcaagagaagatccaaggaaggaaggcagatgagagtcagcacagagagggatgctgaaaagtaaaagggatgggtggatggagagaagcccgggtctgaccacccaatggccaatattttggccacaagcgactaccagagacatggaaaaatggtttctacatgtgggacaacagatggtagaggacctagagaattgagagaggggcaatgatgggctccactccgcagatgccttggctttcttcctggatacccttcctgcactgaatagcaaggagatggagcccaagcagactgtagccatcttgctgaatggaggagagggattggagtttgggatgactgtggtagctgaaatttttctaggtctgctagaaataagaactggtttgtgtggaggaaaagagctctacaaatacgcatagaagtctcctccagtcgttggcctgacatgacgctgcctgtgcacaggaaatggttccacgagaaagtgtggcaaagaacatttactgagaaacagcaagtacaagagcacaggaagctcaataaagaagagagagatcacatagcactctgggatactggagttcttcccagctagaccagagagtcctcacggagcacattgccaattcagtggagaccccagaacagccgtaatttaaaggtacacttagtatattactagaataaagtcagctgcagacaaccccttgcacagctggaaagcaagtgtccaagcatcaaatcggtttccaatcaatgaagtgcctgtgagaggaaatctcaactctctttagaagtaaacaacaaagtcgattgcctcagctatgcggtatccgcagagtgagtcctaaatttaaaatctgactacatgtagaaaagcgtttcgtgtgacccatgaccaggaaataaatcgggtaatacaaacaggctcaggaatgagagaaatgattagaattgcgtgaaaatttgacatatcagtatgataactgatttcaaatatttaaaaaaacaacatgcaagaaagcagatatcatatcaagagaaattaacagtacagaatagccaaattaaattaaagaggtagtataaaaaaagtatgtcttaattgaaaaaaattactgtatggccggctgatcaatttagacgtttcagaggaaaacattacccaacacacaattctagagaacctacagaatgagctacacacacacacacacacacacacacacacactgaaaacacacccatactcacacacacgcagaaactcacaagttctaacacacacagacacgcgcacccctgaagaaacagtgaaatataaaattaagcgagcctcacagacatgtaggaaaatatgaaaagatttcctgcatgtgggaagcaagtcacagtaaagagcaagggagtttataatagaaacaaataccagaatcaaggatggctgataacttttcaattacgaagaacattaaaaaaaatcacagaatcgtgaaactcaagggatcatatagggaatttcggaaaaaaaacccaacctgtatgatgtacttttgtacatcacagttcgaaggtaacaaggcaaagatgtaataagaagaaacctgtcacgagaaactggaggaaaaagagctgtgtcttcctacaagtacactgatacaaattgccaatgtgttcacctcagaaacactggaagccagataccagggaatattgttaaaatgataatcaggaacaaaaagagatcaaccgggaatgctgaatccagcaataaaatgccttgaaggtcatccatgtcggataaatgcatattgtgcactgccccaaagaaagaaaccggaaactgtaagaattggaaatcagcaggcttatgtaacaagagaggtgacccgaaggaattaggtagaagaagaattgaacaagaaaggaactttctgcagcccacgtaatgaagaatccagcaattggcaaatgtagatagatgtaaatgcaaaatattttcttgatcaaatttctatatctttgtaaatgagagttgactacttgaaacaaaatgatagcaagatatttaacttcagcatatgtagaggtaagaatttgaaatggtagcataaatcacgaagggattaattcgaagtgtaccgttgtaagtttctttacctcatgcacgatggtgtgtcatattaataaaagggtactgtgcgggttcgaagggatattgcaaatcctagagcaatcacaaaggtttgaactctgaggtttttggtataataagaatagtccatgcattcaaaagagggaagccaaggaagaactagaagtctttcaagagctcaggctcttatacatccagttgctcattgaaccagcttcctggaatggagggtctggggttgagactaggccacaagtctagagtctctagagagacagtgttggaaccccatggcccataatacatttcccattttctcaggcagccagaggtcatgaatgtgaggatactgggaggttggagcaacgttcttgggaggcataaggaagagcgaatgcttcaagatccccgcagcccaaactactcgcctgctttgccccctaatgcatttttctctgctgctccgtagctgtccgacctcttcagatctcttagtccaccctgccgtcttcctttatgccatgggtcccactgttctttcaactcatccccctttccctcagtcccggagtagctgcggccagcagagggtagactgagagcaggagagaaggacctgcctaggaaccccttctagagatactgcatcctgcctgggagcaagttttccagggcagctttgagaagtcttggagaaacaaacctactaaacctgacagacagtaatactatttgcacaatgcttttctgtgggaaaggtagagccttttcactacgtattgagtacatagagtgtgagggttgacctggaacggctatcctcctggatgacgtgtgttttctgaagaactacatgttcgttgcaactcccacattagaatatgaagtcctaccgagagagatacggagactagacagatacagatgcatttgcatgtgaatacacaatcccacaatacagacgtcaaaacccataccagttattccagagagatggattgggcagaaggcagaaggagaatactctgatcgtttttcggccacgtgtgtgtgttatctcagtgtttctaagaagcgtttgctactttagattttttatttaaaaaaatagtaataatctattaagtatgagagatgtgcagagaggattagtgatcgagagccatttttgctggtggcaatcatatggtacttttaatgggaatattagaaaggcaccggtaatgaccttgttgcagcacaaaggagagagtgtggggtgcccctgcatgttgtcccacctcttgtgacgtgtatcgttttggaatttccagtggcttgatcatgaactactgcaggaatccagatgctgtggcagctccttattgttatacgagggatcccggtgtcaggtgggagtactgcaacctgacgcaatgctcagacgcagaagggactgccgtcgcgcctccgactgttaccccggttccaagcctagaggctccttccgaacaaggtaaggagtctgtggccagacatctacacgcttcgatgctgggatgaaaagccatggaaattcccactgatgcagccgccttcaatggtaaacggatgctcgagtgttgcctgagttctaccatgtaggaggaagcctccgtgcactctctgggggagccagcggagtgatttctggtgcaacgtggttgggctttgtctttaggatgggcacaaaccctccagggggatcgacttcaaaattcaccttgttgtaaaacgggctacctcagtgtcccagccaaaatttttattgtaacatgctgtcaggtgtgtcactctttccaagccagtaagcttttccggggatttcttcaagtagccagcattcagagcaatcttcagcattgcagattctgagaaatgtggctctggagcctgtcaccctcgagaaacctaagagggctgcattgattccatgtggccctgggtctatggagcagtacatgagctcccagtgctctaaggctcttcagccctaggctttgaagggagtgatttctcagtattcttaaacctctttctgatgacacttgtacctgtgaggggtctagagagaaagagtagtagactcctactttactacaattcaggatgcagggcatgagaggattccctctctcctccaagggaagaagcttttggcgtgcacacatccctgagaagcaaagtgtctttgtcttcagtcagatacataggaccgttttctgccccatggcccggaagccaaaggccttggctttcatgatcaacggtctagggaaacatgcaaaatttccatgtctgtcccaaactctgcccccgacagccaattaccacctgcagcccgcattgccaaatgcggtgccgtttgcatgaagattcagtagagtttcctagaaaggtgctacctcgtgagctcactttccaatgaggaatctgatctgttgtgtttctctaaggtgtcaggtgaaatatttccaagaacttactacagttctagaatgggaggaatctgttgctttggtgtttgtttgttggtcggttttctcacatccatctgcctatggataaggaaaagagaacggtcgtaattctcatagactcctttctggttgtgtcacaaatggcttcacatgtttctctatgctcagagatactcagcttgatttcccgtgttttcatttcagcaccgactgagcaaaggcctggggtgcaggagtgctaccatggtaatggacagagttatcgaggcacatactccaccactgtcacaggaagaacctgccaagcttggtcatctatgacaccacactcgcatagtcggaccccagaatactacccaaatgcgtatgtctttgttctttaccataagagaagaaagggccaagtgaagtttctgttacaagagatgtgtctcaagctgagttctccgaactcaacttgtgacagatgcagatggcgtagcaaaatgtctcaggatgattgccttggagctaagggtctgagagaagggaaatgttaagctccctctccttcctcctagttctattgagcagaagggaaatctggaggtgaggagatcacattatgaagaaagtcagaatgacaaaggaccagacacttagattacccttccacaacaccaactaaacgtcaatggagactttccagttggaattccgttattctggcttccacttcctgaagggaaggttgcgtttgccttttctctctgggttcaagaggaaagaataggtgcttatttatggacaggtgaattgatctgtttctatatctacgtatattccgattgtcagaaaaacactcgttcctaagtaccagtggcctgaagggatacaggttcccagcaagagaagatccaaggaaggaaggcagatgagagtcagcacagagagggatgctgaaaagtaaaagggatgggtggatggagagaagcccgggtctgaccacccaatggccaatattttggccacaagcgactaccagagacatggaaaaatggtttctacatgtgggacaacagatggtagaggacctagagaattgagagaggggcaatgatgggctccactccgcagatgccttggctttcttcctggatacccttcctgcactgaatagcaaggagatggagcccaagcagactgtagccatcttgctgaatggaggagagggattggagtttgggatgactgtggtagctgaaatttttctaggtctgctagaaataagaactggtttgtggaggaaaagagctctacaaatacgcatagaagtctcctccagtcgttggcctgacatgacgctgcctgtgcacaggaaatggttccacgagaaagtgtggcaaagaacatttactgagaaacagcaagtacaagagcacaggaagctcaataaagaagagagagatcacatagcactctgggatactggagttcttcccagctagaccagagagtcctcacggagcacattgccaattcagtggagaccccagaacagccgtaatttaaaggtacacttagtatattactagaataaagtcagctgcagacaaccccttgcacagctggaaagcaagtgtccaagcatcaaatcggtttccaatcaatgaagtgcctgtgagaggaaatctcaactctctttagaagtaaacaacaaagtcgattgcctcagctatgcggtatccgcagagtgagtcctaaatttaaaatctgactacatgtagaaaagcgtttcgtgtgacccatgaccaggaaataaatcgggtaatacaaacaggctcaggaatgagagaaatgattagaattgcgtgaaaatttgacatatcagtatgataactgatttcaaatatttaaaaaaacaacatgcaagaaagcagatatcatatcaagagaaattaacagtacagaatagccaaattaaattaaagagctagtataaaaaaagtatgtcttaattgaaaaaaattactgtatggccggctgatcaatttagacgtttcagaggaaaacattacccaacacacaattctagagaacctacagaatgagctacacacacacacacacacacacacacaaactgaaaacacacccatactcacacacacgcagaaactcacaagttctaacacacacagacacgcgcacccctgaagaaacagtgaaatataaaattaagcgagcctcacagacatgtaggaaaatatgaaaagatttcctgcatgtgggaagcaagtcacagtaaagagcaagggagtttggaatagaaacaaataccggaatcaaggatggctgataacttttcaattacgaagaacattaaaaaaaatcacagaatcgtgaaactcaagggatcacatagggaatttcggaaaaaaaacccaacctgtatgatgtacttttgtacatcacagttcgaaggtaacaaggcaaagatataataagaagaaacctgtcacgagaaactggaggaaaaagagctgtgtcttcctacaagtacactgatacaaattgccaatgtgttcacctcagaaacactggaagccagataccagggaatattgttaaaatgataatcaggaacaaaaagagatcaaccgggaatgctgaatccagcaataaaatgccttgaagatcatccatgtcggataaatgcatattgtgcactgccccaaagaaagaaaccggaaactgtaagaattggaaatcagcaggcttatgtaacaagagaggtgacccgaaggaattaggtagaagaagaattgaacaagaaaggaactttctgcagcccacgtaatgaagaatccagcaattggcaaatgtagatagatgtaaatgcaaaatattttcttgatcaaatttctatatctttgtaaatgagagttgactacttgaaacaaaatgatagcaagatatttaacttcagcatatgtagaggtaagaatttgaaatggtagcataaatcacgaagggattaattcgaagtgtaccgttgtaagtttctttacctcatgcacgatggtgtgtcatattaataaaagggtactgtgcgggttcgaagggatattgcaaatcctagagcaatcacaaaggtttgaactctgaggtttttggtataataagaatagtccatgcattcaaaagagggaagccaaggaagaactagaagtctttcaagagctcaggctcttatacatccagttgctcattgaaccagcttcctggaatggagggtctggggttgagactaggccacaagtctagagtctctagagagacagtgttggaaccccatggcccataatacatttcccattttctcaggcagccagaggtcatgaatgtgaggatactgggaggttggagcaacgttcttgggaggcataaggaagagcgaatgcttcaagatccccgcagcccaaactactcgcctgctttgccccctaatgcatttttctctgctgctccgtagctgtccgacctcttcagatctcttagtccaccctgccgtcttcctttatgccatgggtcccactgttctttcaactcatccccctttccctcagtcccggagtagctgcggccagcagagggtagactgagagcaggagagaaggacctgcctaggaaccccttctagagatactgcatcctgcctgggagcaagttttccagggcagctttgagaagtcttggagaaacaaacctactaaacctgacagacagtaatactatttgcacaatgcttttctgtgggaaaggtagagccttttcactacgtattgagtacatagagtgtgagggttgacctggaacggctatcctcctggatgacgtgtgttttctgaagaactacatgttcgttgcaactcccacattagaatatgaagtcctaccgagagagatacggagactagacagatacagatgcatttgcatgtgaatacacaatcccacaatacagacgtcaaaacccataccagttattccagagagatggattgggtaggaggcagaaggagaatactctgatcgtttttcggccacgtgtgtgtgttatctcagtgtttctaagaagcgtttgctactttagattttttatttaaaaaaaatagtaataatctattaagtatgagagatgtgcagagaggattagtgatcgagagccatttttgctggtggcaatcatatggtacttttaatgggaatattagaaaggcaccggtaatgaccttgttgcagcacaaaggagagagtgtggggtgcccctgcatgttgtcccacctcttgtgacgtgtatcgttttggaatttccagtggcttgatcatgaactactgcaggaatccagatgctgtggcagctccttattgttatacgagggatcccggtgtcaggtgggagtactgcaacctgacgcaatgctcagacgcagaagggactgccgtcgcgcctccgactgttaccccggttccaagcctagaggctccttccgaacaaggtaaggagtctgtggccagacatctacacgcttcgatgctgggatgaaaagccatggaaattcccactgatgcagccgccttcaatggtaaacggatgctcgagtgttgccggagttctgccatgttgggggaagcctccgtgtactctctgggggagccagcggagtgatttctggtgcaacttgggtgggctttgtctttagaatgggcacaaaccttccagggtgatgggcttcacaactcacctccttctaaaatgggctatctcagtgtcttagccaaaatttttattgtaacgtgctgtcaggtgtgtgattctttctgtcgcagtaagcttttctggggatttcttcaagtagccagcagtcagtgcaatcttcagcattgcagatttcaaaaaatgtggctctggagcctgtcatcctcgagaaacctaacagggctgcattaattccatatggtcctgggtctatggagcagtatatgagctcccaatgctctaaggctcttcagtcctaggctttgaagggagtgatttctcagtgttcttaaacctctttctgatggcacttgtacctgtgaggggtctagagagaaaggttagtagacttctcctttactgcaattcaggatgcagggcatgagaagattccctccctcctccaagggaagaaggttttggcgtgcacacatccttgagaagcaaagtgtctttgccttcagtcagatatataggatcgttttctgccccatggcctggaagccagaggccttggctttcatgatcaacgatctagggaaacatgcaaaatttccatgtctttcccctcctctgccctcgacagccaattaccacctgcatcctgcattgccaaatgcagtgccctttgtatgaacattcagtagagtttcatagaaaggtgctacttcgtgagcgcactttgcagtgagaaggagtctgttctgttctgtttttctaaggatttcaggtgaaatatttcctagaacttactacagttctagattggtaggaatctgtaggtttgctgtatgttttttggttggttttctcccatccatctgcctacaggtaagggaaagataacgttcgtaattctcatagactcctttctggttgtgtcataaatggcttcacatatttcgttattctcagagatactcagtttatttcttgtgttttcatttcagcaccgactgagcagaggcctggggtgcaggagtgctaccacggtaatggacagagttatcgaggcacatactccaccactgtcactggaagaacctgccaagcttggtcatctatgacaccacactcgcatagtcggaccccagaatactacccaaatgcgtatgtctttgttctttaccataagagaagaaagggccaagtgaagtttctgttacaagagatgtgtctcaagctgagttctccgaactcaacttgtgacagatgcagatggcgtagcaaaatgtctcaggatgattgccttggagctaagggtctgagagaagggaaatgttaagctccctctccttcctcctagttctattgagcagaagggaaatctggaggtgaggagatcacattatgaagaaagtcagaatgacaaaggaccagacacttagattacccttccacaacaccaactaaacgtcaatggagactttccagttggaattccgttattctggcttccacttcctgaagggaaggttgcgtttgccttttctctctgggttcaagaggaaagaataggtgcttatttatggacaggtgaattgatctgtttctatatctacgtatattccgattgtcagaaaaacactcgttcctaagtaccagtggcctgaagggatacaggttcccagcaagagaagatccaaggaaggaaggcagatgagagccagcacagagagggatgctgaaaagtaaaagggatgggtggatggagagaagcccgggtctgaccacccaatggccaatattttggccacaagcgactaccagagacatggaaaaatggtttctacatgtgggacaacagatggtagaggacctagagaattgagagaggggcaatgatgggctccactccgcagatgccttggctttcttcctggatacccttcctgcactgaatagcaaggagatggagcccaagcagactgtagccatcttgctgaatggaggagagggattggagtttgggatgactgtggtagctgaaatttttctaggtctgctagaaataagaactggtttgtggaggaaaagagctctacaaatacgcatagaagtctcctccagtcgttggcctgacatgacgctgcctgtgcacaggaaatggttccacgagaaagtgtggcaaagaacatttactgagaaacagcaagtacaagagcacaggaagctcaataaagaagagagagatcacatagcactctgggatactggagttcttcccagctagaccagagagtcctcacggagcacattgccaattcagtggagaccccagaacagccgtaatttaaaggtacacttagtatattactagaataaagtcagctgcagacaaccccttgcacagctggaaagcaagtgtccaagcatcaaatcggtttccaatcaatgaagtgcctgtgggaggaaatctcaactctctttagaagtaaacaacaaagtcgattgcctcagctatgcggtatccgcagagtgagtcctaaatttaaaatctgactacatgtagaaaagcgtttcgtgtgacccatgaccaggaaataaatcgggtaatacaaacaggctcaggaatgagagaaatgattagaattgcgtgaaaatttgacatatcagtatgataactgatttcaaatatttaaaaaaacaacatgcaagaaagcagatatcatatcaagagaaattaacagtacagaatagccaaattaaattaaagagctagtataaaaaaagtatgtcttaattgaaaaaaattactgtatggccggctgatcaaattagacgtttcagaggaaaacattacccaacacacaattctagagaacctacagaatgagctacacacacacacacacacacacacacacacactgaaaacacacccatactcacacacacgcagaaactcacaagttctaacacacacagacacgcgcacccctgaagaaacagtgaaatataaaattaagcgagcctcacagacatgtaggaaaatatgaaaagatttcctgcatgtgggaagcaagtcacagtaaagagcaagggagtttggaatagaaacaaataccggaatcaaggatggctgataacttttcaattacgaagaacattaaaaaaaatcacagaatcgtgaaactcaagggatcatatagggaatttcggaaaaaaaacccaacctgtatgatgtacttttgtacatcacagttcgaaggtaacaaggcaaagatataataagaagaaacctgtcacgagaaactggaggaaaaagagctgtgtcttcctacaagtacactgatacaaattgccaatgtgttcacctcagaaacactggaagccagataccagggaatattgttaaaatgataatcaggaacaaaaagagatcaaccgggaatgctgaatccagcaataaaatgccttgaagatcatccatgtcggataaatgcatattgtgcactgccccaaagaaagaaaccggaaactgtcagaattggaaatcagcaggcttatgtaacaagagaggtgacccgaaggaattaggtagaagaagaattgaacaagaaaggaactttctgcagcccacgtaatgaagaatccagcaattggcaaatgtagatagatgtaaatgcaaaatattttcttgatcaaatttctatatctttgtaaatgagagttgactacttgaaacaaaatgatagcaagatatttaacttcagcatatgtagaggtaagaatttgaaatggtagcataaatcacgaagggattaattcgaagtgtaccgttgtaagtttctttacctcatgcacgatggtgtgtcatattaataaaagggtactgtgcgggttcgaagggatattgcaaatcctagagcaatcacaaaggtttgaactctgaggtttttggtataataagaatagtccatgcattcaaaagagggaagccaaggaagaactagaagtctttcaagagctcaggctcttatacatccagttgctcattgaaccagcttcctggaatggagggtctggggttgagactaggccacaagtctagagtctctagagagacagtgttggaaccccatggcccataatacatttcccattttctcaggcagccagaggtcatgaatgtgaggatactgggaggttggagcaacgttcttgggaggcataaggaagagcgaatgcttcaagatccccgcagcccaaactactcgcctgctttgccccctaatgcatttttctctgctgctccgtagctgtccgacctcttcagatctcttagtccaccctgccgtcttcctttatgccatgggtcccattgttctttcaactcatccccctttccctcagtcccggagtagctgcggccagcagagggtagactgagagcaggagagaaggacctgcctaggaaccccttctagagatactgcatcctgcctgggagcaagttttccagggcagctttgagaagtcttggagaaacaaacctactaaacctgacagacagtaatactatttgcacaatgcttttctgtgggaaaggtagagccttttcactacgtattgagtacatagagtgtgagggttgacctggaacggctatcctcctggatgacgtgcgttttctgaagaactacatgttcgttgcaactcccacattagaatatgaagtcctaccgagagagatacggagactagacagatacagatgcatttgcatgtgaatacacaatcccacaatacagacgtcaaaacccataccagttattccagagagatggattgggcagaaggcagaaggagaatactctgatcgtttttcggccacgtgtgtgtgttatctcagtgtttctaagaagcgtttgctactttagattttttatttaaaaaaaatagtaataatctattaagtatgagagatgtgcagagaggattagtgatcgagagccatttttgctggtggcaatcatatggtacttttaatgggaatattagaaaggcaccggtaatgaccttgttgcagcacaaaggagagagtgtggggtgcccctgcatgttgtcccacctcttgtgacgtgtatcgttttggaatttccagtggcttgatcatgaactactgcaggaatccagatgctgtggcagctccttattgttatacgagggatcccggtgtcaggtgggagtactgcaacctgacgcaatgctcagacgcagaagggactgccgtcgcgcctccgactgttaccccggttccaagcctagaggctccttccgaacaaggtaaggagtctgtggccagacatctacacgcttcgatgctgggatgaaaagccatggaaattcccactgatgcagccgccttcaatggtaaacggatgctcgagtgttgcctgagttctaccatgtaggaggaagcctccgtgcactctctgggggagccagcggagtgatttctggtgcaacgtggttgggctttgtctttaggatgggcacaaaccctccagggggatcgacttcaaaattcaccttgttgtaaaacgggctacctcagtgtcccagccaaaatttttattgtaacatgctgtcaggtgtgtcactctttccaagccagtaagcttttccggggatttcttcaagtagccagcattcagagcaatcttcagcattgcagattctgagaaatgtggctctggagcctgtcaccctcgagaaacctaagagggctgcattgattccatgtggccctgggtctatggagcagtacatgagctcccagtgctctaaggctcttcagccctaggctttgaagggagtgatttctcagtattcttaaacctctttctgatgacacttgtacctgtgaggggtctagagagaaagagtagtagactcctactttactacaattcaggatgcagggcatgagaggattccctctctcctccaagggaagaagcttttggcgtgcacacatccctgagaagcaaagtgtctttgtcttcagtcagatacataggaccgttttctgccccatggcccggaagccaaaggccttggctttcatgatcaacggtctagggaaacatgcaaaatttccatgtctgtcccaaactctgcccccgacagccaattaccacctgcagcccgcattgccaaatgcggtgccgtttgcatgaagattcagtagagtttcctagaaaggtgctacctcgtgagctcactttccaatgaggaatctgatctgttgtgtttctctaaggtgtcaggtgaaatatttccaagaacttactacagttctagaatgggaggaatctgttgctttggtgtttgtttgttggtcggttttctcacatccatctgcctatggataaggaaaagagaacggtcgtaattctcatagactcctttctggttgtgtcacaaatggcttcacatgtttctctatgctcagagatactcagcttgatttcccgtgttttcatttcagcaccgactgagcaaaggcctggggtgcaggagtgctaccatggtaatggacagagttatcgaggcacatactccaccactgtcacaggaagaacctgccaagcttggtcatctatgacaccacactcgcatagtcggaccccagaatactacccaaatgcgtatgtctttgttctttaccataagagaagaaagggccaagtgaagtttctgttacaagagatgtgtctcaagctgagttctccgaactcaacttgtgacagatgcagatggcgtagcaaaatgtctcaggatgattgccttggagctaagggtctgagagaagggaaatgttaagctccctctccttcctcctagttctattgagcagaagggaaatctggaggtgaggagatcacattatgaagaaagtcagaatgacaaaggaccagacacttagattacccttccacaacaccaactaaacgtcaatggagactttccagttggaattccgttattctggcttccacttcctgaagggaaggttgcgtttgccttttctctctgggttcaagaggaaagaataggtgcttatttatggacaggtgaattgatctgtttctatatctacgtatattccgattgtcagaaaaacactcgttcctaagtaccagtggcctgaagggatacaggttcccagcaagagaagatccaaggaaggaaggcagatgagagtcagcacagagagggatgctgaaaagtaaaagggatgggtggatggagagaagcccgggtctgaccacccaatggccaatattttggccacaagcgactaccagagacatggaaaaatggtttctacatgtgggacaacagatggtagaggacctagagaattgagagaggggcaatgatgggctccactccgcagatgccttggctttcttcctggatacccttcctgcactgaatagcaaggagatggagcccaagcagactgtagccatcttgctgaatggaggagagggattggagtttgggatgactgtggtagctgaaatttttctaggtctgctagaaataagaactggtttgtggaggaaaagagctctacaaatacgcatagaagtctcctccagtcgttggcctgacatgacgctgcctgtgcacaggaaatggttccacgagaaagtgtggcaaagaacatttactgagaaacagcaagtacaagagcacaggaagctcaataaagaagagagagatcacatagcactctgggatactggagttcttcccagctagaccagagagtcctcacggagcacattgccaattcagtggagaccccagaacagccgtaatttaaaggtacacttagtatattactagaataaagtcagctgcagacaaccccttgcacagctggaaagcaagtgtccaagcatcaaatcggtttccaatcaatgaagtgcctgtgagaggaaatctcaactctctttagaagtaaacaacaaagtcgattgcctcagctatgcggtatccgcagagtgagtcctaaatttaaaatctgactacatgtagaaaagcgtttcgtgtgacccatgaccaggaaataaatcgggtaatacaaacaggctcaggaatgagagaaatgattagaattgcgtgaaaatttgaaatatcagtatgataactgatttcaaatatttaaaaaaacaacatgcaagaaagcagatatcatatcaagagaaattaacagtacagaatagccaaattaaattaaagagctagtataaaaaaagtatgtcttaattgaaaaaaattactgtatggccggctgatcaatttagacgtttcagaggaaaacattacccaacacacaattctagagaacctacagaatgagctacacacacacacacacacacacacacaaactgaaaacacacccatactcacacacacgcagaaactcacaagttctaacacacacagacacgcgcacccctgaagaaacagtgaaatataaaattaagcgagcctcacagacatgtaggaaaatatgaaaagatttcctgcatgtgggaagcaagtcacagtaaagagcaagggagtttggaatagaaacaaataccagaatcaaggatggctgataacttttcaattacgaagaacattaaaaaaaatcacagaatcgtgaaactcaagggatcacatagggaatttcggaaaaaaaacccaacctgtatgatgtacttttgtacatcacagttcgaaggtaacaaggcaaagatataataagaagaaacctgtcacgagaaactggaggaaaaagagctgtgtcttcctacaagtacactgatacaaattgccaatgtgttcacctcagaaacactggaagccagataccagggaatattgttaaaatgataatcaggaacaaaaagagatcaaccgggaatgctgaatccagcaataaaatgccttgaagatcatccatgtcggataaatgcatattgtgcactgccccaaagaaagaaaccggaaactgtaagaattggaaatcagcaggcttatgtaacaagagaggtgacccgaaggaattaggtagaagaagaattgaacaagaaaggaactttctgcagcccacgtaatgaagaatccagcaattggcaaatgtagatagatgtaaatgcaaaatattttcttgatcaaatttctatatctttgtaaatgagagttgactacttgaaacaaaatgatagcaagatatttaacttcagcatatgtagaggtaagaatttgaaatggtagcataaatcacgaagggattaattcgaagtgtaccgttgtaagtttctttacctcatgcacgatggtgtgtcatattaataaaagggtactgtgcgggttcgaagggatattgcaaatcctagagcaatcacaaaggtttgaactctgaggtttttggtataataagaatagtccatgcattcaaaagagggaagccaaggaagaactagaagtctttcaagagctcaggctcttatacatccagttgctcattgaaccagcttcctggaatggagggtctggggttgagactaggccacaagtctagagtctctagagagacagtgttggaaccccatggcccataatacatttcccattttctcaggcagccagaggtcatgaatgtgaggatactgggaggttggagcaacgttcttgggaggcataaggaagagcgaatgcttcaagatccccgcagcccaaactactcgcctgctttgccccctaatgcatttttctctgctgctccgtagctgtccgacctcttcagatctcttagtccaccctgccgtcttcctttatgccatgggtcccactgttctttcaactcatccccctttccctcagtcccggagtagctgcggccagcagagggtagactgagagcaggagagaaggacctgcctaggaaccccttctagagatactgcatcctgcctgggagcaagttttccagggcagctttgagaagtcttggagaaacaaacctactaaacctgacagacagtaatactatttgcacaatgcttttctgtgggaaaggtagagccttttcactacgtattgagtacatagagtgtgagggttgacctggaacggctatcctcctggatgacgtgtgttttctgaagaactacatgttcgttgcaactcccacattagaatatgaagtcctaccgagagagatacggagactagacagatacagatgcatttgcatgtgaatacacaatcccacaatacagacgtcaaaacccataccagttattccagagagatggattgggcagaaggcagaaggagaatactctgatcgtttttcggccacgtgtgtgtgttatctcagtgtttctaagaagcgtttgctactttagattttttatttaaaaaaaatagtaataatctattaagtatgagagatgtgcagagaggattagtgatcgagagccatttttgctggtggcaatcatatggtacttttaatgggaatattagaaaggcaccggtaatgaccttgttgcagcacaaaggagagagtgtggggtgcccctgcatgttgtcccacctcttgtgacgtgtatcgttttggaatttccagtggcttgatcatgaactactgcaggaatccagatgctgtggcagctccttattgttatacgagggatcccggtgtcaggtgggagtactgcaacctgacgcaatgctcagacgcagaagggactgccgtcgcgcctccgactgttaccccggttccaagcctagaggctccttccgaacaaggtaaggagtctgtggccagacatctacacgcttcgatgctgggatgaaaagccatggaaattcccactgatgcagccgccttcaatggtaaacggatgctcgagtgttgcctgagttctaccatgtaggaggaagcctccgtgcactctctgggggagccagcggagtgatttctggtgcaacgtggttgggctttgtctttaggatgggcacaaaccctccagggggatcgacttcaaaattcaccttgttgtaaaacgggctacctcagtgtcccagccaaaatttttattgtaacatgctgtcaggtgtgtcactctttccaagccagtaagcttttccggggatttcttcaagtagccagcattcagagcaatcttcagcattgcagattctgagaaatgtggctctggagcctgtcaccctcgagaaacctaagagggctgcattgattccatgtggccctgggtctatggagcagtacatgagctcccagtgctctaaggctcttcagccctaggctttgaagggagtgatttctcagtattcttaaacctctttctgatgacacttgtacctgtgaggggtctagagagaaagagtagtagactcctactttactacaattcaggatgcagggcatgagaggattccctctctcctccaagggaagaagcttttggcgtgcacacatccctgagaagcaaagtgtctttgtcttcagtcagatacataggaccgttttctgccccatggcccggaagccaaaggccttggctttcatgatcaacggtctagggaaacatgcaaaatttccatgtctgtcccaaactcttcccccgacagccaattaccacctgcagcccgcattgccaaatgcggtgccgtttgcatgaagattcagtagagtttcctagaaaggtgctacctcgtgagctcactttccaatgaggaatctgatctgttgtgtttctctaaggtgtcaggtgaaatatttccaagaacttactacagttctagaatgggaggaatctgttgctttggtgtttgtttgttggtcggttttctcacatccatctgcctatggataaggaaaagagaacggtcgtaattctcatagactcctttctggttgtgtcacaaatggcttcacatgtttctctatgctcagagatactcagcttgatttcccgtgttttcatttcagcaccgactgagcaaaggcctggggtgcaggagtgctaccatggtaatggacagagttatcgaggcacatactccaccactgtcacaggaagaacctgccaagcttggtcatctatgacaccacactcgcatagtcggaccccagaatactacccaaatgcgtatgtctttgttctttaccataagagaagaaagggccaagtgaagtttctgttacaagagatgtgtctcaagctgagttctccgaactcaacttgtgacagatgcagatggcgtagcaaaatgtctcaggatgattgccttggagctaagggtctgagagaagggaaatgttaagctccctctccttcctcctagttctattgagcagaagggaaatctggaggtgagaagatcacattatgaagaaagtcagaatgacaaaggaccagacacttagattacccttccacaacaccaactaaacgtcaatggagactttccagttggaattccgttattctggcttccacttcctgaagggaaggttgcgtttgccttttctctctgggttcaagaggaaagaataggtgcttatttatggacaggtgaattgatctgtttctatatctacgtatattccgattgtcagaaaaacactcgttcctaagtaccagtggcctgaagggatacaggttcccagcaagagaagatccaaggaaggaaggcagatgagagtcagcacagagagggatgctgaaaagtaaaagggatgggtggatggagagaagcccgggtctgaccacccaatggccaatattttggccacaagcgactaccagagacatggaaaaatggtttctacatgtgggacaacagatggtagaggacctagagaattgagagaggggcaatgatgggctccactccgcagatgccttggctttcttcctggatacccttcctgcactgaatagcaaggagatggagcccaagcagactgtagccatcttgctgaatggaggagagggattggagtttgggatgactgtggtagctgaaatttttctaggtctgctagaaataagaactggtttgtgtggaggaaaagagctctacaaatacgcatagaagtctcctccagtcgttggcctgacatgacgctgcctgtgcacaggaaatggttccacgagaaagtgtggcaaagaacatttactgagaaacagcaagtacaagagcacaggaagctcaataaagaagagagagatcacatagcactctgggatactggagttcttcccagctagaccagagagtcctcacggagcacattgccaattcagtggagaccccagaacagccgtaatttaaaggtacacttagtatattactagaataaagtcagctgcagacaaccccttgcacagctggaaagcaagtgtccaagcatcaaatcggtttccaatcaatgaagtgcctgtgagaggaaatctcaactctctttagaagtaaacaacaaagtcgattgcctcagctatgcggtatccgcagagtgagtcctaaatttaaaatctgactacatgtagaaaagcgtttcgtgtgacccatgaccaggaaataaatcgggtaatacaaacaggctcaggaatgagagaaatgattagaattgcgtgaaaatttgacatatcagtatgataactgatttcaaatatttaaaaaaacaacatgcaagaaagcagatatcatatcaagagaaattaacagtacagaatagccaaattaaattaaagaggtagtataaaaaaagtatgtcttaattgaaaaaaattactgtatggccggctgatcaatttagacgtttcagaggaaaacattacccaacacacaattctagagaacctacagaatgagctacacacacacacacacacacacacacaaactgaaaacacacccatactcacacacacgcagaaactcacaagttctaacacacacagacacgcgcacccctgaagaaacagtgaaatataaaattaagcgagcctcacagacatgtaggaaaatatgaaaagatttcctgcatgtgggaagcaagtcacagtaaagagcaagggagtttggaatagaaacaaataccggaatcaaggatggctgataacttttcaattacgaagaacattaaaaaaaatcacagaatcgtgaaactcaagggatcacatagggaatttcggaaaaaaaacccaacctgtatgatgtacttttgtacatcacagttcgaaggtaacaaggcaaagatataataagaagaaacctgtcacgagaaactggaggaaaaagagctgtgtcttcctacaagtacactgatacaaattgccaatgtgttcacctcagaaacactggaagccagataccagggaatattgttaaaatgataatcaggaacaaaaagagatcaaccgggaatgctgaatccagcaataaaatgccttgaaggtcatccatgtcggataaatgcatattgtgcactgccccaaagaaagaaaccggaaactgtaagaattggaaatcagcaggcttatgtaacaagagaggtgacccgaaggaattaggtagaagaagaattgaacaagaaaggaactttctgcagcccacgtaatgaagaatccagcaattggcaaatgtagatagatgtaaatgcaaaatattttcttgatcaaatttctatatctttgtaaatgagagttgactacttgaaacaaaatgatagcaagatatttaacttcagcatatgtagaggtaagaatttgaaatggtagcataaatcacgaagggattaattcgaagtgtaccgttgtaagtttctttacctcatgcacgatggtgtgtcatattaataaaagggtactgtgcgggttcgaagggatattgcaaatcctagagcaatcacaaaggtttgaactctgaggtttttggtataataagaatagtccatgcattcaaaagagggaagccaaggaagaactagaagtctttcaagagctcaggctcttatacatccagttgctcattgaaccagcttcctggaatggagggtctggggttgagactaggccacaagtctagagtctctagagagacagtgttggaaccccatggcccataatacatttcccattttctcaggcagccagaggtcatgaatgtgaggatactgggaggttggagcaacgttcttgggaggcataaggaagagcgaatgcttcaagatccccgcagcccaaactactcgcctgctttgccccctaatgcatttttctctgctgctccgtagctgtccgacctcttcagatctcttagtccaccctgccgtcttcctttatgccatgggtcccactgttctttcaactcatccccctttccctcagtcccggagtagctgcggccagcagagggtagactgagagcaggagagaaggacctgcctaggaaccccttctagagatactgcatcctgcctgggagcaagttttccagggcagctttgagaagtcttggagaaacaaacctactaaacctgacagacagtaatactatttgcacaatgcttttctgtgggaaaggtagagccttttcactacgtattgagtacatagagtgtgagggttgacctggaacggctatcctcctggatgacgtgcgttttctgaagaactacatgttcgttgcaactcccacattagaatatgaagtcctaccgagagagatacggagactagacagatacagatgcatttgcatgtgaatacacaatcccacaatacagacgtcaaaacccataccagttattccagagagatggattgggcagaaggcagaaggagaatactctgatcgtttttcggccacgtgtgtgtgttatctcagtgtttctaagaagcgtttgctactttagattttttatttaaaaaaaatagtaataatctattaagtatgagagatgtgcagagaggattagtgatcgagagccatttttgctggtggcaatcatatggtacttttaatgggaatattagaaaggcaccggtaatgaccttgttgcagcacaaaggagagagtgtggggtgcccctgcatgttgtcccacctcttgtgacgtgtatcgttttggaatttccagtggcttgatcatgaactactgcaggaatccagatgctgtggcagctccttattgttatacgagggatcccggtgtcaggtgggagtactgcaacctgacgcaatgctcagacgcagaagggactgccgtcgcgcctccgactgttaccccggttccaagcctagaggctccttccgaacaaggtaaggagtctgtggccagacatctacacgcttcgatgctgggatgaaaagccatggaaattcccactgatgcagccgccttcaatggtaaacggatgctcgagtgttgcctgagttctaccatgtaggaggaagcctccgtgcactctctgggggagccagcggagtgatttctggtgcaacgtggttgggctttgtctttaggatgggcacaaaccctccagggggatcgacttcaaaattcaccttgttgtaaaacgggctacctcagtgtcccagccaaaatttttattgtaacatgctgtcaggtgtgtcactctttccaagccagtaagcttttccggggatttcttcaagtagccagcattcagagcaatcttcagcattgcagattctgagaaatgtggctctggagcctgtcaccctcgagaaacctaagagggctgcattgattccatgtggccctgggtctatggagcagtacatgagctcccagtgctctaaggctcttcagccctaggctttgaagggagtgatttctcagtattcttaaacctctttctgatgacacttgtacctgtgaggggtctagagagaaagagtagtagactcctactttactacaattcaggatgcagggcatgagaggattccctctctcctccaagggaagaagcttttggcgtgcacacatccctgagaagcaaagtgtctttgtcttcagtcagatacataggaccgttttctgccccatggcccggaagccaaaggccttggctttcatgatcaacggtctagggaaacatgcaaaatttccatgtctgtcccaaactctgcccccgacagccaattaccacctgcagcccgcattgccaaatgcggtgccgtttgcatgaagattcagtagagtttcctagaaaggtgctacctcgtgagctcactttccaatgaggaatctgatctgttgtgtttctctaaggtgtcaggtgaaatatttccaagaacttactacagttctagaatgggaggaatctgttgctttggtgtttgtttgttggtcggttttctcacatccatctgcctatggataaggaaaagagaacggtcgtaattctcatagactcctttctggttgtgtcacaaatggcttcacatgtttctctatgctcagagatactcagcttgatttcccgtgttttcatttcagcaccgactgagcaaaggcctggggtgcaggagtgctaccatggtaatggacagagttatcgaggcacatactccaccactgtcacaggaagaacctgccaagcttggtcatctatgacaccacactcgcatagtcggaccccagaatactacccaaatgcgtatgtctttgttctttaccataagagaagaaagggccaagtgaagtttctgttacaagagatgtgtctcaagctgagttctccgaactcaacttgtgacagatgcagatggcgtagcaaaatgtctcaggatgattgccttggagctaagggtctgagagaagggaaatgttaagctccctctccttcctcctagttctattgagcagaagggaaatctggaggtgaggagatcacattatgaagaaagtcagaatgacaaaggaccagacacttagattacccttccacaacaccaactaaacgtcaatggagactttccagttggaattccgttattctggcttccacttcctgaagggaaggttgcgtttgccttttctctctgggttcaagaggaaagaataggtgcttatttatggacaggtgaattgatctgtttctatatctacgtatattccgattgtcagaaaaacactcgttcctaagtaccagtggcctgaagggatacaggttcccagcaagagaagatccaaggaaggaaggcagatgagagtcagcacagagagggatgctgaaaagtaaaagggatgggtggatggagagaagcccgggtctgaccacccaatggccaatattttggccacaagcgactaccagagacatggaaaaatggtttctacatgtgggacaacagatggtagaggacctagagaattgagagaggggcaatgatgggctccactccgcagatgccttggctttcttcctggatacccttcctgcactgaatagcaaggagatggagcccaagcagactgtagccatcttgctgaatggaggagagggattggagtttgggatgactgtggtagctgaaatttttctaggtctgctagaaataagaactggtttgtgtggaggaaaagagctctacaaatacgcatagaagtctcctccagtcgttggcctgacatgacgctgcctgtgcacaggaaatggttccacgagaaagtgtggcaaagaacatttactgagaaacagcaagtacaagagcacaggaagctcaataaagaagagagagatcacatagcactctgggatactggagttcttcccagctagaccagagagtcctcacggagcacattgccaattcagtggagaccccagaacagccgtaatttaaaggtacacttagaatattactagaataaagtcagctgcagacaaccccttgcacagctggaaagcaagtgtccaagcatcaaatcggtttccaatcaatgaagtgcctgtgagaggaaatctcaactctctttagaagtaaacaacaaagtcgattgcctcagctatgcggtatccgcagagtgagtcctaaatttaaaatctgactacatgtagaaaagcgtttcgtgtgacccatgaccaggaaataaatcgggtaatacaaacaggctcaggaatgagagaaatgattagaattgcgtgaaaatttgacatatcagtatgataactgatttcaaatatttaaaaaaacaacatgcaagaaagcagatatcatatcaagagaaattaacagtacagaatagccaaattaaattaaagagctagtataaaaaaagtatgtcttaattgaaaaaaattactgtatggccggctgatcaaattagacgtttcagaggaaaacattacccaacacacaattttagagaacctacagaatgagctacacacacacacacacacacacacacacacacaaactgaaaacacacccatactcacacacacgcagaaactcacaagttctaacacacacagacacgcgcacccctgaagaaacagtgaaatataaaattaagcgagcctcacagacatgtaggaaaatatgaaaagatttcctgcatgtgggaagcaagtcacagtaaagagcaagggagtttataatagaaacaaataccagaatcaaggatggctgataacttttcaattacgaagaacattaaaaaaaatcacagaatcgtgaaactcaagggatcatatagggaatttcggaaaaaaaacccaacctgtatgatgtacttttgtacatcacagttcgaaggtaacaaggcaaagatgtaataagaagaaacctgtcacgagaaactggaggaaaaagagctgtgtcttcctacaagtacactgatacaaattgccaatgtgttcacctcagaaacactggaagccagataccagggaatattgttaaaatgataatcaggaacaaaaagagatcaaccgggaatgctgaatccagcaataaaatgccttgaaggtcatccatgtcggataaatgcatattgtgcactgccccaaagaaagaaaccggaaactgtaagaattggaaatcagcaggcttatgtaacaagagaggtgacccgaaggaattaggtagaagaagaattgaacaagaaaggaactttctgcagcccacgtaatgaagaatccagcaattggcaaatgtagatagatgtaaatgcaaaatattttcttgatcaaatttctatatctttgtaaatgagagttgactacttgaaacaaaatgatagcaagatatttaacttcagcatatgtagaggtaagaatttgaaatggtagcataaatcacgaagggattaattcgaagtgtaccgttgtaagtttctttacctcatgcacgatggtgtgtcatattaataaaagggtactgtgcgggttcgaagggatattgcaaatcctagagcaatcacaaaggtttgaactctgaggtttttggtataataagaatagtccatgcattcaaaagagggaagccaaggaagaactagaagtctttcaagagctcaggctcttatacatccagttgctcattgaaccagcttcctggaatggagggtctggggttgagactaggccacaagtctagagtctctagagagacagtgttggaaccccatggcccataatacatttcccattttctcaggcagccagaggtcatgaatgtgaggatactgggaggttggagcaacgttcttgggaggcataaggaagagcgaatgcttcaagatccccgcagcccaaactactcgcctgctttgccccctaatgcatttttctctgctgctccgtagctgtccgacctcttcagatctcttagtccaccctgccgtcttcctttatgccatgggtcccactgttctttcaactcatccccctttccctcagtcccggagtagctgcggccagcagagggtagactgagagcaggagagaaggacctgcctaggaaccccttctagagatactgcatcctgcctgggagcaagttttccagggcagctttgagaagtcttggagaaacaaacctactaaacctgacagacagtaatactatttgcacaatgcttttctgtgggaaaggtagagccttttcactacgtattgagtacatagagtgtgagggttgacctggaacggctatcctcctggatgacgtgcgttttctgaagaactacatgttcgttgcaactcccacattagaatatgaagtcctaccgagagagatacggagactagacagatacagatgcatttgcatgtgaatacacaatcccacaatacagacgtcaaaacccataccagttattccagagagatggattgggcagaaggcagaaggagaatactctgatcgtttttcggccacgtgtgtgtgttatctcagtgtttctaagaagcgtttgctactttagattttttatttaaaaaaaatagtaataatctattaagtatgagagatgtgcagagacgattagtgatcgagagccatttttgctggtggcaatcatatggtacttttaatgggaatattagaaaggcaccggtaatgaccttgttgcagcacaaaggagagagtgtggggtgcccctgcatgttgtcccacctcttgtgacgtgtatcgttttggaatttccagtggcttgatcatgaactactgcaggaatccagatgctgtggcagctccttattgttatacgagggatcccggtgtcaggtgggagtactgcaacctgacgcaatgctcagacgcagaagggactgccgtcgcgcctccgactgttaccccggttccaagcctagaggctccttccgaacaaggtaaggagtctgtggccagacatctacacgcttcgatgctgggatgaaaagccatggaaattcccactgatgcagccgccttcaatggtaaacggatgctcgagtgttgcctgagttctaccatgtaggaggaagcctccgtgcactctctgggggagccagcggagtgatttctggtgcaacgtggttgggctttgtctttaggatgggcacaaaccctccagggggatcgacttcaaaattcaccttgttgtaaaacgggctacctcagtgtcccagccaaaatttttattgtaacatgctgtcaggtgtgtcactctttccaagccagtaagcttttccggggatttcttcaagtagccagcattcagagcaatcttcagcattgcagattctgagaaatgtggctctggagcctgtcatcctcgagaaacctaacagggctgcattaattccatatggtcctgggtctatggagcagtatatgagctcccaatgctctaaggctcttcagtcctaggctttgaagggagtgatttctcagtgttcttaaacctctttctgatggcacttgtacctgtgaggggtctagagagaaaggttagtagacttctcctttactgcaattcaggatgcagggcatgagaagattccctccctcctccaagggaagaaggttttggcgtgcacacatccttgagaagcaaagtgtctttgccttcagtcagatatataggatcgttttctgccccatggcctggaagccagaggccttggctttcatgatcaacgatctagggaaacatgcaaaatttccatgtctttcccctcctctgccctcgacagccaattaccacctgcatcctgcattgccaaatgcagtgccctttgtatgaacattcagtagagtttcatagaaaggtgctacttcgtgagcgcactttgcagtgagaaggagtctgttctgttctgtttttctaaggatttcaggtgaaatatttcctagaacttactacagttctagattggtaggaatctgtaggtttgctgtatgttttttggttggttttctcccatccatctgcctacaggtaagggaaagataacgttcataattctcatagactcctttctggttgtgtcataaatggcttcacatatttcgttattctcagagatactcagtttatttcttgtgttttcatttcagcaccgactgagcagaggcctggggtgcaggagtgctaccacggtaatggacagagttatcgaggcacatactccaccactgtcactggaagaacctgccaagcttggtcatctatgacaccacactcgcatagtcggaccccagaatactacccaaatgcgtatgtctttgttctttaccataagagaataaagggccaactgaagtttctgtgacaagagacatgcttcaagctgagttctccgaactcaacttgtgtcagattcagatggtgtagcaaaatgtctcaggatgatttccttggagctaagggtctgagagaagagaaatgttaagctgcctcaccttcctcctagttttgtggagcagaagggaaatgaggaggcgaggagatcaccttatgaagaaagtcagaatgacgaaccaccaaacacttagattacccttgcccaacacccactaagcgtcaatgaagactttccagttggaattccgttattctgacttccaattcctgaagggaagattgtgtttgccttttctgtctgggctcatgaggaaagtttatgtgcttacttatggacaggtgaattgatctgtttctatttctacctgtattccaatagggagaaaatctcttggtcctaagtaccagtggcctgaaaggatagaggttcccagcaagagaagatccaaggaaggaaggcagatgagagtcagcacagagagggatgctgaaaagtaaaagggatgggtagatggatagaagccctggtctgaccaccccatggccaatcatttggccataatcaacaaccaaagacatggaaaaatggtttctacatgtgggacaacagatggtagaggacctagagaattgagagagggccaatgatgagctcaactccatagatgccttggctttcttcctggatacccttcctgcactgaatagcaaggagatggagctcaagcagcctgtagccatctagctgagcagaggagagggattggagtttgggatgactctggtattttctaggtccgctacaaataagaactggtttgtggaggaaaggagctctacaaatacgcatagaagtctcctccagtagttggcctcacatgacactgcatgtgcacagaaaatggttctacagaaagtgtggcaaagaacatttactgagaaacagcaactacaagagaacagcaagctcaattaagaagatagagatcacatagcactctgtgttattggagttcttaccagctagatgagagagtgctcacggaacacattgccaattcagtggagaccccagaacagccataatttcaaagtacaattagtatattactagaataaaggcagctgcagacaaccccttgcacagctgaaaagcaagtgtccaagcatcaaatgggtttccaatcaatgaagtgcctgtgagaggaaatctcaactctcttcagaagtaaacaacaaagtcaattgcctcagctatgcggtatccccagagtgagtcctaaattaaaaatttgactacgtgtagaaaagaatttcgtgtgatccatgaccagaaaataaatcaggcaatacaaacaggctcagaaatgacatcgataattagaattgcatgaaaatttgacatatcagtatgataactgatttcagatatttaaaaaaagtgcaacaaagcaggtatcatatcaagacaaattaatagtatagaatagccaaatcaaattaaagaactattatacaaaaagtatgtcttaaatgaagaaattactgtatgtccgcctgaaaaatttagatgtttcagaagaaaaaattaaccaaaaacaattctgcagaacctacagaatgagccacacacacacacattcaaaacacacccatacacacacacatgcaaaaactcacaagttctaacacacacacaaacacacacacacatgcacatccctaaagaaatagggaaatataaaattaaccgaccctcagagacatgcaggaaaatataagaagatttcctgcatgtgggaagcaagtcacagtaaagagcaagggagtttggagtagatacaaataccggaatcacggatggctgataacttttcaattatgaagaacgttagaaaaatcacagattcatgaaactaaagggatcaaataggaaatttcgagaaaaaaaactacatgatgcacttctctacatcacagttcaaaggtaacaaggcaaggatataagaagaagaaacatctcacgagaaactggagaaaaaagagctgtgtcttcctagagtacagtgatacaaattgctaatgcgttcacctcagaaacactggaagccagataccagggaatattattaaaatgataatgaggaacaagaagagatcaaccgagaatgctgaatccagcaataaaatgccttgaagatcatccatgttggataaatgcatattgtgcactgcccaaaacaaagaaactggaaagtgtaagactttggaatcagcaggcttatgtagcaacagaggtgacccgaaagaattaggtataagaagaatagaagaattgcatgaaaatttgacatatgactaagataactatttcaaatatttaaaaaaagatgaatatgtaataaaacagataaaatatcaaaagaaagtaacagtattgactagccaaatcaaattaaagacttagtgtaaaaagctatgtcttaaaagaaaaaattactggatggctgcctgatcaatttagacatttctgaataggaaactaaccaaaaatcaattctacagaaccaactacacacatatatacacatacaacacacccatacacacccacgcaaaaactcacaagttcacacacacacacacacacacacaaccctcaagaaatagtgaaatagaaaaccaaccgaacctcacagacatgttgcaaaataggaaaagatttcctgcatatgggaagcaagtcacagaaaagagaacgggagattggaaacagaaacaaataccggaatcaaggatggccgaaaacttttcattgatcaagaatattaacaaaatcgcaaaaacacgaaattcaatgcatcaaataggcgtttcgaaaaaaagaaaaaatctggtatgatgcacttttgtacttcacattttcacggtaagaagacaaagatataataacaagaaacttcttatgagaaactggggaaaaacaagctgtttcttgctagaagaacagtgatacaaattgctaatgcattctcgtcaaaaacactggaagccagataccgggaatgttattaatgtggtaaacaggaacaagaagagatcaaccaagaatgctaaatccagcaataaaatgccttgaagatcatccatgctgcataaatgtatgttgtgcactgccccaaacaaagaaaccggaaactgtaagaatttggaatcagcaggctgatgtaacaagagaggtgacccaaaggaattaggtagaagaagaatagtacaagaagggaactttctgcagcccatgtaatgaagaacccagcaattggcaaatgtagatgtaaatgcaaaatattttcttgaccaaatttctatatatttttaaatgagcgttgactactggaaacaaaatgatagcaatatatttaattttagcatatgtagaggtaagaatttgaacaagtagcgtaaatcatgtagggaataattagaagtgtaccattgtaagtttcttacctcatgcacaatggtatgtaatattaataaaatgttactgtgtgggttcaaggagatattgcaaatcctagagcaatcacaaagttttgaactctgaggtatattgtataataagaatattccatgtattcaaaagagagaagccaaggaagaaagaaatttgtcacgagtttgggctcttagtacatcctgtagctcattgaaccagcttcctggaatggagggtctgggattgacactaggccacatgtatagagtctctagagagacagtgtttcatccccatggcccgtaatacatttcccattttctcaggcagccacaggtcatgaatgtgaggatagagagaggttggagcaacgttcttgggaggcataaggaagagcaaatgcttcaagatccccgcagcccaaactcctacctgctttgccccctaatgcagtgttcctccgtagctgtccgacctcttcagatctcttagtctaccctgccatcttcctttatgccatgggtcccactgttctttcaactcatccccctttccctcagtgcagagtagctgcggccagcagagggtagactgagagcaggagagaaggtcctgcccaggaacccattctagagatgctgcattctgcctgggagcaagttttccagggcagctttgagaagtcttgcagaaacaaacctatttgacccacatgatatgggaatgacagaaagtaatacaatttgcacagtgcttttccatgggaaaagtagagccttttcgcgaggttttgagtacatagagagtgaaggttgacctggaaaggttatcctcctggatcccatgttttttctgaagaactacctgttagttgcaacttgcacattagaatatgaagtcctaccgagagagatacggagaactagataaatacagatacttttgtatgtgaataaacgattccacaatacacacatcaaaatccataccagttattccagagagatggattgggcagaaggcagaaggagaatactctgatcgttttttgcccacgtgtatgtattatctcagtgtttctaagaagcgtttgctactttagatttttttttataataataatcttttaagtatgagaaatgtgcagacaggattagtgattgagagccatttgtgcttgtggcaatcatatggtacttttatgggaatattagaaaggcactggtaatgaccttgttgcagcacaaaggagagggtgtggggtgcccctgcatattgtcccacctcttgtgacgtgtatcgttttggaatttccagtggcttgatcatgaactactgcaggaatccagatcctgtggcagccccttattgttatacgagggatcccagtgtcaggtgggagtactgcaacctgacacaatgctcagacgcagaagggactgccgtcgcgcctccaactattaccccgattccaagcctagaggctccttctgaacaaggtaaggagcctgtggccagaaacctacacgtttcgatgctgggatgaaaagccatggaaattcccactgatgcagcagcctccaatggtaaacggatgctcgagtgttgactgagttctgtcatgtaggaggaagcctccgtgcactctctgggggagccagcggattgatttctggtacaacgttgggtgggctgtgtctttagaattggcacaaaccctccagggtgatcgacttcacaactcacctcgttgaaaaatgggctatctcagtgtcttagccaaaatttttattgtaacatgctgtcagatgtgtgactctttccaagccagtaagcttttcctgggacttcttcaattagccagcattcagtgcaatcttcagcattgcagattcagagaaatgtggctctggagcctgtcacccttgagaaacagggctaacagggttgcattaattccaaatcaccctggttctatggagcagtacatgaactcccaatgatctatgtttcaggacttcctcagtcataggtgggctctgcagccctaggtttttaagtgagtgactgccccgtgttctggtggcagttgtacctgtgagcggtctggatagaaagagtcggagacttctgtattattgcaactcaggatgtgggtcatgagaggatttcatctctcctgcaggggagtaagctgttcgcctccacccatccctgataactgaagtgtctttgtctgcagtcctagacgaaggactgttgtctctcccatggcccagaagctgaagaccttgccttttgttatgaaacgttcattgttttcatgtctgtccgtttctctgcccctaacacccaatcaccatgtatggcctgtacccccaaatgcatcgtgctttgctgtttgctgccccatagtcctcatgaacattcagtagaaattcccataaatgtgcttgcacgtgagcacagtttccattgagaagccctctcatttgtcctttttttctaagcttttatgtgaaatatttctaagaacttactacagttctaaagtgttaggaatttgtttctttggtgtttttgtttgttggttggttgttgcttttctcaagtccatctgcctacaaataaagaaacaagaatgttacttgtcatattctcctgaggtcataattctcagagacttttttctggtttgtgccataagtggcttcacatgtttgtctcttcttggaaacactcagtttgatttcttttcttttcatttcagcaccaactgagcaaaggcctggggtgcaggagtgctaccacggaaatggacagagttatcaaggcacatacttcattactgtcacaggaagaacctgccaagcttggtcatctatgacaccacactcgcatagtcggaccccagcatactacccaaatgcgtatgtctattttctttaccataagtgaaggaagggtcagtggaaatttctgttagtagagtcatgcttcaagctgagtgttcaggactcaagttgtctcagatgaacagtgcatagcaaaatgtctcaggaacattgtctttgagcaaagagtctaagagaagacaaatgttaatctggctctccttcctcctagtttaatggagcagaaaggtatctggaggcaaggatatcacattaagaaacaagtcaagatgacaaatgatgaaactcttagagtacccttccacaacacccactaaggttcaatgcagccttttctccttggaattctattaaactaaactccaattcctgaagtgaaggttctgttggggttttctgttttggcttacaaggaaagtatatatgtatatctatggagaggcaaatctatctctttctatatctacgtctattccaatatgtagaaacacagtcggttctgaccaccagtggtctgaagggatactggttgttagagaataaaaatggcaggaaggcagatgagagtcagcaaagagagagatcctgtaaagtaaaagggtggatagatggacagaagcccaggtctgaccagcccatggccaggctttaggccataagtgacaccaaagacatggaaaaatggtttctacatgttggacaacagacagtagtggaccaaaagaatagtgacagggggaacaatgagatcaactccatagataccttggctttcttcctggaggcccttcttgcactgaagagcaaggtgatggagcccagatggactgtagccatcttcctgaatgcaggagagagattggaatttgggactactgtggtagctaggattttataggcctgctgagaatgagaatggatttgtggatgaaaggagctccaggggcacgcatagtagtctcctcgaatctttggctaaacatgacgttgcatgtgcccagaaaaaggttccacaagaaagtagagaaaagaatatatcctgaggaatagcaactgcgattgaacagtgagctcaataaagaggacagagccctcatagcattctgggatactggagttctgaccagctggaggagagacctcactgaacctcttgggaatacagtagagactccagaaaagtcatactttaggagtagaattagtaaatttctagaaaaaaaggcagctctagacaaaccctggcaaaactgaaaagcaagtctccaagcattaaaatcatttccaagtcaattaactgcctgggagaggaaaaccctctttagaggtaaacaacaaagtcaagtggctcagctatgtggtgttcacagtgtgagttctaaatttaaaacttgactacacatagagaagcttttagtatgaaccatgaccaggtgaaaaatcagtcaatacaaatagacctagaaatgacagaaatgattagaatggcaaaaaatttgacatatcaatatgtcaactgagttttaggttttaagaaaacatgaatacggaatgaagcagataccatatcaagagacagtaacagtatagaagagccaaattaaattaaagaactagtataagaaggtatgtcttaaatgaaaaaattactggatgtattcccaatggagtgagatgtttcagaagtaaaaactaactgaaaaacaattttataccacctacagaaccagctacacatacacaaatgacacacacatatacacacatactcacacatgcacaggcttagaaacatgcacgcacacacacacacacacacacacacacctccacaaatactaaaaaatgaaatccactgatcctcacagacaggcgggaaaatataaaaagatttcctgcatgtgggtaggaagtcacagaaggagaggaaggagagattgctacaggaacaaatactggaagcaaggatagctaaaaacttttcaaataagaagaatattaaaaaccacagattcaagaagctgaatgaatcagacagggaatttccaaaaaaaaaaaaaaaaaaactgtatgattcacttttgtacatcaccgttcaacagtcagaaggcaaagatataataacaagaaacatctcatgagaaactggaggaaaaagagctgtgtcttgctagaagaacagtgatacaaattgctaatgcattctcatcagaaacactggaacccagttaacaggggatatcattaaaatgataaactagaaaaaaaagagatcaaatgagaatgctacatccagcaataaaatgccttgaagatcatccatgttggataaatgcatattgtgcactgccccaaataaataaaccaaaaactaataatttggaatcagcaggcttgtgtaacaagagatgttgcccaaagaaaattagctagaagaagaatagttcaagaggagaactttctgcagcccacgtaatgaagaacccagcaaatggcaaatgtagatgtaaatgcaaaatattttcttgatcaaatttctatatctttttaaatgagagttgactacttgaagcaaaatgatagcaatatatttaactttagcatatgtagaggtaaaaatttgaacatatagactaaatcatgtggggaataattggaagtgtaccattgtaagtttcttaccttatccacgatggtatgtaatattaatgaaaggttgaatttgtgggtccaaagggatattgtaaatcctaaagcaatcataaaattttgaattctgagggatattatataataagaattttccatgtatccaaaagagggaagccaaggaagaaaaagaagtctttcaagtactcaagctctgagcacatccagttgctcattgaaccagcttcctggaatggagggtctgggcttgagactaggtcacatgtgtagagtctctagagagacagtgttggatccccatggcccataatacatttcccgttttcccaggcagccacaggtcacgaatgggaggattctgagaggttggagcaatgttcttaggaggcataaggaggagtgaatgctctgagatttccccagcctgaggtcctccatagctgcccgacctcttcagacctcatagtctgcccagctgtctccctttatgccatgagtgccactgttctttcaactcatcccccattccctcagtcccggaattgctgtggccagcagaggatggactgagagcaggagaggaagtcctgaccaggaacccatcctagagatactgcatcctgcctgaaagctaggtttccagggcagctttgagaagtcttgcagaaagaaacccacttgacccacctgatacggtatcgacagacaggaatactttttgtgcaatggttttacatgctgaacatagagccttttggctacattttgagtacattgaatgagactgctggcctgggaaggatatcatgctggatgccatttttttctctggagaactatgtgttagttccaactcgcacattactatatgaagtcctacacagagagatacggagagctagacagatagagatacttttgtatgtgcataaccaattccacaatacacacgtcaaaatccataccagttattccagagagatggattgggcagaaggcagaaggaggatattctgatccctttttggccacatgtatgtataatctcagtgtttctaggaagtgtgtgctgcattagattttttttctttaaaaaaagtgataatatattaagtatgagaaatgtgcagagaggattagagattgagagccatttgtcattgtggcaattgtatggtatctcttttgggaatatttcaaaggcaccagtaatgaccttgttgtagcaaaatatacagtgttcctgcatatgtacccattttttgtgatgtgtattcttttggaatttccagtggcttgatcaagaactactgccgaaatccagatcctgtggcagccccttggtgttatacaacagatcccagtgtcaggtgggagtactgcaacctgacacgatgctcagatgcagaatggactgccttcgtccctccgaatgttattctggctccaagcctagaggctttttttgaacaaggtaagaagttgtgccagacatttacctgcttggatgctgggatgaaaagccatggatacccccactgacgcacaacccttcagtgctacactggttctcgtgtgttggttctgggtctgccatgtgggaggaagccttagcgcactctctgggggagccagaggtgtgatttttggtgcaacctgtgcgagctgtgtctttaggatgggcggaaaccattctgggtgctcgacttcaccactcccctcattgtaaaaggggctatctcattgtcctagacaaaattcttattgtaatatgctgtcagatgtgtgtgtctttccaagccagtaaacttttccagggatttcttcaagtagacagcattcagtgcaatcttcagcattgcagattccgagaaatgtggctctagatcctgttatccttgagaaacctaactgggttgcattaattccatatctccctgggtctgtggagtagtacatgagctcccgaagctctatctctcaggtctttttcagtccgaggcaggttgtgcagttcttagctttgaagggagtgattttttcgtgtgcttttgcctctttctgatggaacttgtacctgcggggggtctggagaaaaagagtagtagacttttgctttattgcaatgcattatgctgggcacgagaggattccctatcttattgtaggtgataagcttttggcctccactcatccctgagaagtgaagtgttgttgcctacagttttagctgcaggactgttgtctgccccatcaccaggagtttaatgctttcttttttgagcaatcatctagggacacatgcaaggtttttatatgtccttgcctcctccccaaaaaaccattttaatgcttggagacttgcttttcagctttgccaaatgcatcaccctttcttctatgctgttccatgtcgtcatgaacactctgtagagattcctagaaatgagcttccatgttagtggagtttccgatgagaagcaatctgatatttcttttccactaagttttacatgaaatatttctaagaacttactacagttctagaatggtaggcatctcttactttcgtgtttgtttgtgtgttttctcatgtccatttgcctattaataaagaatagagaatggttgtaaatctcagtgactcttttttggtttatgtcataaatggcttcctgtatttttctgttctaggaaataataagcttgatgtcttctgttttaatttcagcactgactgaggaaacccccggggtacaggactgctactaccattatggacagagttaccgaggcacatactccaccactgtcacaggaagaacttgccaagcttggtcatctatgacaccacaccagcatagtcggaccccagaaaactacccaaatgcgtacgtctttgttctttaccataagcgaaggaagggccaatggaagtttctgttagaagagtcatgcttcaaggtgactgctcaggactcaacttggctcagatgcagaggaacatttcctgtgagcaaaagttcttagagaagactttgtttttttgagacagagtcttgctttgttgcccaggctggagtgcagtggcatgatctcggctcactgcaagctccgcctcccgggttcacaccattctcctgcttcagcctctctagcagctgggactacaggcacccaccaccacacccggctaattttttgtatttttagtagagacagggtttcactgttctagccaggatggtcttggtctcctgacctcgtgatccgcctgcctcagcctcccaaagtgctgggattacaggcgtgagccaccgtgcctggctgagaagacattttttaagctggctctccttcctcctagttttatggaagcagaaggatatatggagttgagaagatcttattaataaaacagccgggatgacaaatgaccaaagagttagagtatccttctacaacatcggctgagggttaatacaaccttttcaccttggaattctatcattctaagctctagtccctgaagtgaatgttgtgttggccttttgcatcttgggtcacagggaattgatacttgcacatctatggagaggcaaatctttttctatctacttctttttcaatgggtacaaacacacttggtcctgagcaccagtggtctgaagagatacggtctgcccagaggagaagaacaaaggcaggaaagcagatgagagtcagcaaaggggcgatgctgaaaagtaaaaggggcgggtagatggacagaagccatgatctggccattctatggccagtctttcggccataagtgactaccaaagacacggcaaaacggtttccacatgttgaacaacagatgctagaggaccaagagtattgcaagagggagaaaatgagatcaacccatcaatgccttggctttcttcaaggagacccttcctgcactgaagagcaaggagatggagcccaagctgactgtagccatgttgctgaacagaggagagtgattggactttgggattactcaggtagttaggattttctagccatgctaagagtaagaatggacttgtggaggataggagctccaggcatagaagtctcctcaagtgttagtctaaacataaagcagcacttgcatagaagattttccacaagaaaatatggcaaaaaaacaccatatattgaggaacaacaactacaagggaacagtgagcttaataaaggtgacagagctcacatagtgctctggaatattggagttttgaccagctagagagaagagacctcattgaaaatcttgggcattcagtagagacctcagaaaagtcagactttatgagtagactttgtatattcctagaataaaggcagctccagaaaaaacctagcaaagctgaaaagcaaatctccaagcattaaaatggtgtcctagtcaattaactgccttctagaagaaaactcaacactctttacaggtgaacaacaaagttaagttgctgagctatgcaatatccacagtgtgagtcctaaatttataactttactacacataaaaaagcatttagtgtgaaccataaccaggaaaataatcagtcaataaaaatagaaccaggaatgatagaaatgatttaaatggcatgagaatttgacatattagtatcataactgcattgctggatttaagaaaacataaacatggaacgtaacagatatcatatcaagggaaagtaaaaggataaaagagtcaaatcaaattaaaggactattaaaaggtatatcttaaatgaaaaattcactggatggtctcccaatcaggttagttgtttccagggaaaaaattaactgaaaaataattcaatagaatctacagaaatagctgcacatatatacacacaatggcacacgtgcacacacccacacccacacaggtgtgaatcctagagccacacgagcattgaaacatagagaagtaaaaattgttcattgaggaatatgtagcaatgctcaatgtgttttaccctaataagagcttttgtgatgtatgattgaaaaactgacacaactgaagagagaaatagataagcccacactctgagttagagatttccttgattctctcactatggttataaatctttcccaaacacaacaggctagaacaaatatgcagaaaattagacatagtatctttgttctcaataaaaacgtcgacctatttaacattataccgaactaccgagtacacattaaagtgtgcatggagcattcactgaggtgtactctacacatgaccttccagcaagtctccatagatttaaaagaattaaagtcatacagagtgtgtcactttattctcccagaataaagtgagatatgaataatgagaagtttgccagcttctcaaatatttgggagtcatacggtgcatttcaaaatactctttgggacaaagaaaacatcactaaggaatttagaaaagttttgaactgagtaagaatataacacaatttatccaaacttaggagatgcagtgaatgtctttaggcttttacataattttagatgctcttagggaaaaacagaagcatgtaataatcaagatttcaaactgcaattctcaaagtgtagtctagagaaacctgaggacctttgagtaccttcagagacagtccatgaggttaaaggactttgctacgtgaaaagtaagatgctattggccctttttactttcattttccaacaagagaagaggggagttttccagcagttacataatatgtaatggcatcatgtctctgatggctaagaaaatgggcaattgttgactttgtgtgttaaaaaaattctcagtgttggtttcttatactataaatattcatcttgtgttttgaaaaagaaaagctctttggaatcccctatgaacaaagactttgacagttgttgatctaagaccacagcttaaatatctacacaagaaaaaaaaaaaaagcaaataagagccaaggaaagcagatggaaggaagtagtccaaaccagtgacattcagtgaacaagaaaagagaccaacaagggagtaaactcttgaaacagaaagttgattctttgaaaagatccatatgattgaacacagtctggctaaacaaatgacagaccaatgagggtgcacaaccatcaccatctggagtaacagaggagaggtgccattactatagcatcttccagttctgaaagctgaaaagaagattttgagaacaattgtatgtgaataaattcaggaatgttaatcatgtgggccaattcctgaggaagacaacaaatcagcaaaccagatgctgaatagttagtgtagtcctgtagagagacatacagagaggctgacagagaaatatttgtatgtgcataaaacaatctacaagacacacttcaaaatcaatctcagttaatctggaggaacatatttcacagaaggtggaaggagggtattctgatcctcttgtacattgtacaacattgtacaatgtacagagtataattgtacaagtacaattgaagttgtacaagtacaagtgcaacttgcacaatgtacagagtaaacattgatgtttactctcaattttcttatggagcacagatgactttggatgtgttacaatatgaatgataatttgtctttgagatgttcgcagttgtttagaagttgaggaccatttgtgcatattatgggacctttagtgaaaatatttcaaagtctctttttacactttgttacagcaaaatgtagagggcgctaagtgcccttgaatcttctcccatctctggtgacctgtgttgttttgaaatttgcagtggcctgaccaggaactactgcaggaatccagatgctgagattcgcccttggtgttacaccatggatcccagtgtcaggtgggagtactgcaacctgacacaatgcctggtgacagaatcaagtgtccttgcaactctcacggtggtcccagatccaagcacagaggcttcttctgaagaaggtaggaagtctatggccagacaaccacaccctaggacgttgggatgaaaagagttgcaaaatcttagtgatatagaagccttccatgctcacacaattccaagtagaatgtggactcagggtcagccactgggaaggaacactcagcgccttctctgggagaaccagagctgtgatgtttggtaccctgtgaaagggtggtatctataggaagggtgcagaccctctagggcactggacttaccactcccctggttattcaaaggatcattttagtgtcttagccagaagaatattctaacattttgccaaatttgtgaagatttaccaagctcatgataagcctttcatggtatttcttcaagtagtcagtgttcattgcatctttggctttgcggtttcggaggaatgcggtttttgagtctgtcatccttgagaaacctaatatgacttttcttagttccatatacttctgggtccaggtagcagtacatagccaacaaatgctccatcgttctggcctatctccatcttaagccagtcctgcacaactaggctttgatgggagggatctctcagtgttcttgcccctccttctcatggaacatatatctgtgttggtctctgagaagaagagtagtggatatctactttgttgcaatgcagaatcctgggccaaagataccagccatccctccaagggaataaaattttggccagtagccctctctgagagacaatttgtctttgcctacgagtcctagatgcaggaccgcttcctgccccatcttcaagaagctgaaggctttggctttggaggatcagcagtctagggaaatgtgtgacggtttcatgtctgtccccactgacagtcaatcaccacctacaacctgcacagcctgatgcatagcagtctagtttcctgccttattctcaggaacacccagaagatgtctatattaaagagcatgcacatgagtgcaattttgactgataggcactctgatctttcctttggtgcctgtgttttaaaggaaatctttctaagaactcgttaaagttctagaatgctatgaatctttgggttttattattggtatgtccatctgcctgctagtacagaacagagcatggtagtctttctcagagacaatgatcctgtttcagtcacagatttcttctgatgcttctgtgttctagaaattactcagcttgatttctcctctttgaatttcagcaccaacggagcaaagccccggggtccaggattgctaccatggtgatggacagagttatcgaggctcattctctaccactgtcacaggaaggacatgtcagtcttggtcctctatgacaccacactggcatcagaggacaacagaatattatccaaatgggtacaaccttgagttttcttcaaagacagacagcagcccccttacatttctcttggaagggccatgcttccaactaacttcttatgacaaatttatctcagatctggaatgttgggtagaatgtctcaggcttctttcttcaggcacagtgtctgaaaggagagaaatgtcaggccagctctcttttctcatagttgacagaagcaggaggatatttgaaggtggtgagttctcatgaatagaaagctcaggacacatggccacgtgcttagaaatagcaccattccacaatgcccactaaagaccaatgcaatagttcaaccagggatttctgtcattctaatctccaagtcctgaagtgaaggttgtattagccatgttcatcttgggcaacaaataaaggatatctatgttgacatccagatcttccaatcactttctcctctaacctgtacctgggttctgagaacaaggtatctgaagagctatgtgttgccagcacatgaggggcaaaagtaggaaggcagctgagagtcaggaagtataaagattctgaagagttacacatgcaggaagatggacagaaacccagttcagaccacgtcagcgtttctgccatgaaggactatcaaatacataggaaaagtgttttcataggttggacaacagacatgacaggcctgagaaaattcagaaagggaatcaaaggagatcaaccttatcatgtccctggcatccttccttgagacccttgaagggcaagcagatggagcccagctgaccacagcagtcttgcttaactgaggagagagactggagtttgtgatgcctcaggcatctgacgtattctaggctggctaagaatgagaggggatttgtggaggaaaggagctccaagaatacacaccgaagtcttctcaaggctttggctaaatacaaagctgcgtatgcacaaggagagttttcacaaagaaagaacaataaagaaaagctactggggaaagaacaactgcaagggaacagtgagctcaatggagatgctagagctcacatagcactgggggatatttgagttctgaccactcagaggagagacacctcactgaacatcttgggcattcagtagaggtcaaagaaagccataatttgggagtaggatcttcggattcctagaaataaggtgactccagaaacactccagcaacccttcttccaagccagtctaaaaggatccaaatgatttccaagtaaattaactgccttccagaaaaaagtaaactcaaccctccttagaggtaaggaacgaatacaagtttctcagttatatgacatccccagagtgcaacttgcatttaaaaatttactagacacaaaagaagttttcactgtgatccataactgggagaaaaatcactcaacacaaataggcccagaaataatagaaattatggcattggcaagaacatttaaaatgcacctctgagaactgtgtttcaggaaaatgtcagcaaaagctgaccatgagagaaatgaatgcataatatcagaaaagaaaagaattgaagagccaaatggaaatttaaaaactgagaaaagttatatctgtaatgaggaattcactggatggccttataaccagtttagatattatggtaggaaaaggtgaacgagaaaatgattcaattaaagctagacaaaccacaagacagacagacagacacaaatacacatacacacaatgactgaaccaattaatcaacagagcctcaaggacatctaggaaaacatccacacatttaatatatgtgttaggcaagtcacagaaagagaggaaaaagataatgtgacagaagttatacttgaagccatgacggctgacaaatttccaaacatacagaaaatgagaaattcatagtcatgaagctcaatgactcaggtatagatttttaaagagcaaaactctgatttactggggtacatcatagttaaattgtctgatttcaaagctaagaagaaaaaaagggggttcctatgaacaaacattttgacagttgatctaagaccacagcttaaatatctaggcaaggaaaagcaaataagacacaaggaaaggggatggatggaaatagtccaaaccaatgacattcagtgaacaagaaaatagaccaacaaaggagtaaatccatgaaacagaaagttggttctttgaaaagattcatgtgattgaccacagtctggctgaacagatgacagaccaaggagggagtacaaccatcaccatttgaagtaacaggggagaggagccattgctataccatactccaggtctgaaagctgacaagaagatatcaagaaaaactgtatgtgaataaattcatgaatgtagatcatgtggatcaattccttaggtaaacaacaaatcagcaaaccagatactgaatagattgggtactcctatagaaagacatacagatagccagacagagaaacatttgtacgtgcataaaacaatctacaagactcacttcaaaatctctcagttaatccaaagtaacatatttggcagaaggtggaaggagggtattctgatcctttcttgtacacattgatgttttctctcggttttcttatggagtatagacgagtttggatgtgttacaataagaatgataatctgtctttgaaatgttcacagttgtttagaagttgaggacgatttgtgattgttacaggacctttagtgagaatatttcaaagtcactttttaccactttgttacaacaaaatgtagaggatgtctggtgcccttgtatcttctcccatctctggtgaactgtattgttttgtaatttgcagtggcctgaccaggaactactgcaggaatccagatgctgagattagtccttggtgttataccatggatcccaatgtcagatgggagtactgcaacctgacacaatgtccagtgacagaatcaagtgtccttgcgacgtccacggctgtttctgaacaaggtaagaagtctctggccagacaaccacacccttggacgttgggataaaaagagttgcaaaatcttagtgatacagaagccttccatgctgcacgggaatctgaatgtggactcagggtcagccaatgggaaggaagcctcagcgccttctctgggggaaccagggctgagatttttggcaccccgtgacagggtggtgtctttaggaagcgtgcagaccttctagggcactggatttaccactcccctggttattcaatagattatttcagtgtcctagtgaaaatggatattctaacatcctgccaaatttgtgatgatttaccaagctcatcatgagcctttcctggtatttcttcaagtagacagtactcattgcaaacttcagctttacagtttcagaggaatgtggtttttgagtctgtcatccttgagaaacctgatatgactttacttagttccatatcctcctgggtctaggtaacagtacatagccagcaaatgctctatctccctgtctaccttaatcttaggcaggtgctgcacacctaggctttgatggaagggatttcttagtgttcttgcccctccttctcatggaacacgtatctgtgttgctgtttgtgaagaagagtagtggatgtctactttgttgcaatgcaggatcctgggcccaagatttcccgccgtccctccaagggaataaaattttggccagtacccctctctgagagacaatgtgtctttgcctggaagtcctagatggaggaccacttcctgccccatcttccagaaacttaaggctttggctttggaggatcagtgctctggagaaatgtgtgacggtttcatgtctgcccccactgacaaccaccacctacagcctgcaccgcctgatgcatggcactctggtctcctgccttgttctcaggaacacccaaaagagatctttgccaaagaacaggcacatgagtgcaattttgactgataggcactctgatctgtcctttggtgcccaggttttaaagaaaatctttctaaaaactcattgaagttccagaatgctatgaatctttgagctttgttattggcatgtccatctgcctactaatgtagaacagagcatggtcgtcattttcagagatgatgtcctgtttctatcatggattttttttctcatgcttctgtgttctggaaattactcagtttgttttctcctctttgaatttcagcaccaacggagcaaagccccacagtccaggactgctaccatggtgatggacagagttatcgaggctcattctccaccactgttacaggaaggacatgtcagtcttggtcctctatgacaccacactggcatcagagaaccacagaatactacccaaatgggtatgtctttgagttttctcccaagagaaacagccacccacttaaatttctcctggaagagccatgcttccagctaacttcttatgacccaatttctctcagacccagaatgttggacagaatgtctcaggcttcttgctttgggcacagggtctgagaggagagaaatgtcaggccagctctcttttctcatagttgatagaagtaggaggatacttggaggtggtgaggtctcatgaatagaaagctcagaagaacatatgaccatgtgcttagaaatagcaccattccacaatgcccactaaagaccagtgaaatagttcaaccagggaattctgtcattctaatctccaagccctggagtgaaggttgtgtttgccatgtttgtcttgggtaacaagtgaaggatatctatattgacttcgagatcttccgatcactttctcctctaacctgtataaacacattgggttctgagaacaaggtgtctgaaaagctatgtgttgccagcccatgaggggcaaaaggaggaaggcagctgagagtcaggaagtatagagatgctgaagagttacacattcaggaagatggacagaaacccatgtctggctatgccagcctttctgccatgaaggactatcaaatacatgagaaaacagttttcacaggttggacaacagatatggtaggcttgagagaactgagaaagggaatcaaaggagatcaacttcatcattaacctgtcttccttcctggacacagtgttggattgaaggacaagcagatggagcccagctgaccacagcagtcttgcttaactgaggagagagactggagtctgcgatgcctcaggcagctgatgtgttctaggctggctaagaatgagaagggatttgtggaagaaaggagctccaggaatacacacagaagtctcctcaaggctttggctaaatacaaagctgcgtatgcacagggagagttttcataaagaaagaacaacaaagaaaagctacttgggaaagaacaactgcaggggaacagtaagctcaatggagatgccagagctcacatagcactgggggatatttgaattctgaccactcagaggagaaacacctcactacattttgggcattcagtagagaccaaagaaagctgtattttgggattgggatcatcttattcctagaatcaaggtgactccagaaaaactccaacaacccttcttccaagccagtctaaaaggatccaaatgatctccaagtaaattaactgcattccacaagaaaaaaaaaactcaaccccccttagaggcaagggacaaatacaagttgctcagttatatggcattcctattgcgttacttctatttaaaaatttaatagagacacaagaagctttcactgtgatacataactgggagaaaaaatcactcaacacaaacaggcccagaaattatagaattgatgacattggtgagaacatttaaaatgcacctctgagaactgtgtttcaggaaaatgtcagcaaaagctgaccatgagagaaacaaaagcagaatagcaagagaaaagaaaagaaccggagagccaaatgaaaattaaagaactgagaaaaggtacatctctaatgaagaactcactggatggccttatcatcactttagacattacggtaggaaaggtgacctagaaaataattcaataggagctacacaaatcacaggacagacagacagaccaacagacagaaacacacacacacacacacacacacacacacacacacacacacacacacaaagactgaacctattaatcaacagagcctcaagggcatctaggaaaaatccacacatttaatatatgtgttaggcaagtcacagaaggagaagaaaaagatatcatgacagacattatacttgaagcgatgatggctcgcaacacgccaaatatacagaaaacaagaaactcatagtcaagaagctaaatgactcaggtatagaattttaaagagcaaaactctatgatttactgggatatatcatagttaagttgcctcaattcaaagctaaaaagaaaaaaagggggttcctatgaacaacagctttgacagctgttgatctaagaccacagcttaaatatctaggcaaggaaaagcaaataaggcacaaggaaagaggatggaaggaaatagtccaaaccaatgacattcagtggaaaagaaaatagaccaacaaaggagtaaatccatgaaacagaaagttaggttctttgaaaagtctatatgattggccaaagtctggctaaacagatgacagaccaaggagggagcatatccatcaccatcatgagtaacaggagagagatgccattgctatagcatcctccaggtgtgaaagctgagaagtagatattgagatcaactgtatgtaaataaattcatgaatgtagatcatgtggatggattgcttaggtaaataacaaatcagcaaatcaaacactgaatagatcatgcagttttatagagacttacagacagcctgacagataaacatttgtatgtacgtgaaacaatctccaagacacacttcaaaatccctctcggttaatccaaaggaatgtatttggcagaaggtagaaggagggtattctgatcctttctggtacacattgatgttttctctcagttttcttataaagcatagattactttgaatgtgttacaataagaatcataagctgtctttgaaatgttgacagttgtttagaagttgaggaccatttgtgagtgttatgggactttagtgagaatatttcaaatttgcttgtttacactttgttacaagaaaacatagagggtgccaggtggtgctgtatcttctccaatctctggtgacctgtattgttttggaatttgcagtggcctgaccaggaactactgcaggaatccagatgctgagattcgcccttggtgttataccatggatcccagtgtcagatgggagtactgcaacctgacgcaatgtccagtgatggaatcaactctcctcacaactcccacggtggtcccagttccaagcacagagcttccttctgaagaaggtaagaagcctgcagtcagacaaccataccctcggacattgggataaaaagatttgcaaaatctttgtgatgcagaaaacttccatgctgcacaggaagtcgaaggtgaagtcatggacagccaatgggaaggaagcttcagtgccttctctggggggaccagagctgggatgttgagtgccttgtgagggatggtgtctttaaaaggggcacagaccctctaggacactggatttatcacttccctgttatcaaacgaatcatattagtgtcctagccaagatggatattctaacatcctgccaaacttgtgaagatataccaagctcctaagcctgtccagccctttcttcaagtaggcagtgtttattgcagtcttcagctttaccattttgaaggaatgccatttttgaggctgttgttcttgagaaacctaacatgtcttcattagatccgtattgtcctgagactttgaagcagtacatagccaccaaattgtttatctccccagcctaccttcatcttgggcatgccttccacacctaggatttgagggaagggatttctcagtgttctcatccctgcttctcatggaacatttatctccgttgttttttgagaagaagagtagtggatgtcagctttcttgtaatgagggatcctgggcccaagattccctgtctcccctcctaggctataaaattttggcctgtactccttctccctgagaggcaatgtgtctttacctacaagtcctagatgcaagatccttttctgccccacaccccagaatctgaaggcttttgctttggaggagcagtggtctagtgtgcaagggtttcatgtataccccccactaacagccaatcaccacctatagcctgaacagcttgatgcatggcaccctggtctcctgccttgttctcatgaacacccagaagaggtgtaagcaaaagaccattcacatgagtgtaattttgaagtataggcactctgatctgttttttgtttgtttctttgtttgtttgttttccagggttgaattaaaatatttatgactacttattaaatttctagaatcctataagtctatttgtatttttattctacatttcaatttgcatgctaatatagaagagtgtaaattgttaatcctcagattattccactttgtgtgtcataatttttttcacatttcccttttctaggcaatactgagcttgattttctcttttaatttcagcaccaactgaaaacagcactggggtccaggactgctaccgaggtgatggacagagttatcgaggcacactctccaccactatcacaggaagaacatgtcagtcttggtcgtctatgacaccacattggcatcggaggatcccattatactatccaaatgcgtatgtctatcatgttagccataaaaggaacaatagtcaactaaaatttctcttagctggcccatgctacaagctcacttcctaggtccaaatttctcatagactcagagtttgtagcaaaatgtctcaggaaacttacttttgagcaaaaggtctgaatgaagagaagttttaggattgctatctttcataacaatttgatggaagcagcaggatatatggaggtggtgaagtctcattaatgtaaagctaaggagatcaaatgaccaaatgctgagacaaagtatcattccacaatgcccactaaaggtccatgcagtctttcaaccatgcaattctatcattctatcctccattccctgaagtgaaatttgtgtttgccatttttgacacgaatcagaagtaacaaattcaggctgggtgcagtggctcaggcctgtgatcccaacactttgggaggacaagacgggcagatcaccagaggtcaggagttcaagaccagcctggctaacatggcaaaaccccatctctacgaaaaattaaaaaattagccggtcatggtggtgggtacctgtaattccaactacttgggaggctgaggcaggagaaacacttgagcctgggattcagagtttgctgtgagccgagaacatgccactgcactccagcctgggtgacagagcaagactcaatctcaaaaaaaaaaaaaaagaagaagaagaagaaaagaagaagaggaagaagaagaagaggaagaagaagaagaagaagaagaggaagaggaagaggaggaggaggaggaggaggaagaagaagaagaagaagaagaagaagaagaagaagaagaagaagaagaagaagaagaagaagaagaaaatagaaatgagtgcatatatttatatatgagtactagcctgtatgaacacactgggttctaagcaccagttttctgaagggatatgggttgtcaggcagagtaaaagcaggaatgcagatgagagtcaggaagtaaacagatgtggtgattaaaatgggcaggtacatggacaaaaaaatgcatgtctgacaaaaactggcctcttgccataagtgagtatgaataatatggaaaaactgtttgcacatgttgaacagcagacagtacaacctgagatagtttagaaagggaaacaaataagatcaaccccataattacccttcctagacttaagggcaaagagttttaaccaaagcattccacagcagtcttgctaaactggggagagagactggagttttgtttactaataaaaccgagattttctaggttaggtaataatgagaaagtatttgtggagaaaaggagctccaggaatacacacagaagtctcttcaagtctctggctgaacagaaagctgtgtatgcacagaaagagtttccagagagaaaggagaacaaagaacagctactggggaaagaacaactgctggggaacagtgagctcaatgaagatgccagagctcacatagcactgggaggtatttgagctctgaccagcctgaggagagacacttcattgaacatcttgggcattcagcaaagaccccaaaaaaccatacttcaggagtagaattaatgcattcctagaataaagtctactccagaaacaccctagaaaagcttagaaaccaagtctaaaaagatccaaatgatctccaagtaaattaattgcctgtcagaagaaaacaacctcttcagaggtaaacaacaaaattaaattgctcaattatatagtatgcacaatgtgtggcatacatttaaaaatttgctaaacatacaaaaagcatttagtgtgacccataaccaggagaaaaatcagtcaatacaaatagacccaaaaatgataaaaataacagaattggcaaggagatttaaaatgtatgtatcataattgtgttcaaggatttaaagaaagcgtggacaagaaataaataaatggataatatcaacagaaagaaaaattgtaaaaggaccaaatggagagtcaagaactgaaaaaaaagacatctctttaatgagaaaatcactacatggccttataatcatattagatagtacagatgataaagctaactagaaaatattagggtggtgcaaaccatagcacgcttatacaaagcctgagaagataaacagagcctcaaggacatctatgaaaatatcaaaatatttaatatttgtttaaagcaagtcacagaggaagggaaagagatattggaacagaaaaaatacttgaagcagtgatggctgatgactttctaaatatggaaaaaatgataaactcacatagtcaagaagctcaatggatcagatataggattttaaaaagtaaagctgtatgatttatttggacacatcataattaaattgtccataatcaaagatagaaagtaaaatcttatttgaagcccaagggaaaaaacatacctttacatagagtaacagtgacacaaatgactgatgccttctcatcagaaacaacacaaatcagaaacaatagaataacacctttagagtggtaagaagaaaaaaagatcaaatcagaaacaacaaaataacacgtttagagtggtaaggaggaaaacaagatcaaatcagaaacaatggaataacacctttagagtgtaagaaagaaaaaaagatcaaatcaggaacaacagaataacgccttcagagtggtaagaaggaaaacaagataaaatcagaaacaatgaaataacacctttagagtagtaagaagaagaaaagatcaggtcagaaaaaatggaataatatgctaagaagaaaaaaaaagatcaagtcagaaacaatggaataacacctttagagtgaaaagaaggaaaaaaacccagcaagcttaaacgctatgcacagcaaacaattccactgaaaatgaatgttacgtaagtacatattctgtcctcctaaaaacaaagaacaaataaaagaatgtttcatcagcaggattatgtaataaaagatgtgaaagaatgctatgtaagtagaagaaaaataataccatatgggaattggcatcaaaaccacaaaatactatcaaaacaaaaaaactttattgataaatttaacacaatatgcaaaagaactataccatgtatactacataacattggtgagaagaaaattagaagatctaaataaagacacatcatgcttatagattaaaaaatccaatgtcacttttcacaaaactgatctttagtttcaacccacacccaagcagaattcctgcagtcttttcttgaaaacctaacagaatgtatatgctagaatcaccaagacaatctttaaaaagaataaaaaacttggaataaaatcacaagtttgtgggatagatgcatatggtaatatggaaattctcataaagacacagtaatcaagacatgtggtattggctgggacgcttggctgtaatcctaacactttgggaggccaagatgagaggattgcctgagatgaggagttgcagacaagcctgggcaacatagcaagaccctcatctctacaaatatttaaaaaaattagccaggtttggtgccatgtgcctgtagtcccagctattcaggaagctgaggtgggaggatcactggagcccatgaggtggaggctgaaatgagccatgattgtgctactgaactttagcctgggagacagattaaaaccttccctctctctctcaaacaaacaaacaaaaaatacatagtattgggcaaaacatatgcaaacaaaaacagaaaagggtcagcataaatttacatatatggtcaatttattttcaatacaggtagcaaagcaatttaatgaggaaatttttttccaaaattggtctgaaacaactggatagccatagaaaaaaactataacaaatgtgacgcttgaatcctactgtatgactcaaattaaattaatttgagatagctcttagacctcaatgtaacagctaattctgaggctgaaatataagactgctatgaaaaagtatagtatcttataaccttggagaaggaaaaattttttgagggaagaaccagaaaacactaactgtaaaagaaaacaaatgataatgtggacattcattgaataaaaacttatgctcaccaaatatgactgttaagaaaataaataagtaagtaacacactggaagaaaaacactctcatccatatatctgacaaatggcctgtatccagagtatagaaacatttctcccactcactaatcagaggacaaacaacctaatcaaaatgggcaacaggcttgaatagtcatttcttaggagaagatgcacacagagccaacaatcacctgaaaaagtgcacaacatcttagccatcaaaaatcaagagttataaccctcataagatgacactgaacatccagtgtacatggatatcattaagaagacacaataataagtggtgtcaccgatttggagctagaatgtgccactctctcatatgctggtggaagttcaaaatcatacaacaaattaaaaaatcagtctgatgctttcttataaagttcgataaatatgcatctatcctacaaacctgtaattctattcttgaatatttaccccccaaaatgaaaacataagtccacaaaaatctatataaatattcatagcagctttatgttttataaactcaaaataaaaactatttcaatgttttcatcaaaagaaaatgaaaactatttaaatggtttcatcaaaagaaaatgaaaaaagaatttccagtatatttatacaaaggaatactattcatcaacaaggaacaagttactgatagtctcagaagcatgaacaaacctcaaaaatatattaaggaaagaagccagacgtcaaagtgtatagtctgtatgagtccattcatgtgagtttatagaaaacacaatttatggtgaaagaaaccaatagcatttgacactggccgtgggaagagggtagcagagattgattgagcagccacacaagggagtttctggggtggtgaaaatgttctgcattgtgagggcagtgtgggctacacaagtatatgtatttatcaaatctcatccagctacatttaagatctgtgcatctcactctatgtgaaaatatactcaactgaaaaacagagcaggtatctgtttcaggtgctacatcacttgatacgtccagttgtgttaaaaaccactgcctaacatcctcaaatgggggatctgggcttgagactaggtcacatgtgtagagtctctacagagaccgtgttggattcccatgctccataatacgttccaagttttctcagacagccacaggtcatgaatgtgaggattctgagaggttggagcaacgttcttgggaggcataatggggaaggcattctccaagattcctccagcctggggtcttcacctgctgtgcctcttactgcattgttttctgactcatccatagccacttgaccccttcagatcccatagtctacctagccgtctccctttatgccttgggtcccgctgttctttcaactcatcacccattccttcagtcccagagtggctgcagccagcagaggatggactgagagcaggagaggaggtcgtgcccatgaacccatcctagagaagcagcatcctgcctgggagctagttttccagggaagcttttataagtcctgtagacccaaacccacttgctctaccagatacagtatttatagtaatactattttcatgattattttatattgcaaatgtagagcatttatgctacactatgagtaaatagagtaagggggctggcatgggaattatataatcttggatgccacttcttccttggggaaatgtatttgagttccaacttacatattactatatagtcttatagagagagagacaaagagctagacagacagagatatctttgtatgtgcattaaaaaatctaagatacatatttcaaaatctgtgtcatttattctggaggaaagtatttggcagaaggtgaaaggaagatattctgatcctttcttgtacagacatgtattatctcagttttcatagagagcatatactacttttgatgttttaaaacaaaaattataatctgtgatgtgtccacagttgtttaaaagttgaagctgaagaccatttgtgcttgtggcaatattattgtggtataatgggaatatttcaaaggcacttgttaacactttgttacagcaaaatgtagagggcgctaagtgcccttgaatattctcccatctctggtgacctgtgttgttttgaaatttgcagtggcctgaccaggaactactgcaggaatccagatgctgagattcgcccttggtgttacaccatggatcccagtgtcaggtgggagtactgcaacctgacacgatgtccagtgacagaatcgagtgtcctcacaactcccacagtggccccggttccaagcacagaggctccttctgaacaaggtaagaaatttgtggttagacatctatatactgggatgaaaaaccatggaaaatcttactgatgcagaagccttcagtggtacactggagggttggttgagggtctgcaatgtggaggaaagcctcagcgccctctctgggggatccagaactgtgatttttggcacgctgtgaggaggcagtgtctttaggaagggcacggtgtctttaggaagggcacagacccgccagggcactggacttaccactcccctggttattaaatgggtcatttcagtgtcctagccaaaatggatattctaacagcctgccaaatatgtgaagatttccaagccaataagcctttccagtgatttaaagtagacttttttcattgcaatctacagtttgcagtttcttaagaacatggcctttgagtatgatatcctagagaaacctaaggagactgcattatttttctattgtcctggggctgcatagcaggaggtaaccaacgaatgctgtctctccctggcctatctcagtctttcacaggctctgttcacctcagctttgaagttagaaatttctaggtgttcttgcctcttcttctcatgaaacctgcattggcagtgagtctacagaagaagaggaagagaattctgctttgttacaattcaggactctgggcactagaagattccctatctctcctccaagggaataagttgtttgtctctaaccctccttgagaaacaatgagtctttgcctgcactcctaaatgtaggatgatttcctgcccaaattttcaaaagattaagccttttgccttggtatgagcaatggtctagggaaatgcgcaagggtcttgtgtcggcccctgactgaccaccagtcacctcctacagcctgcaccaaggaatgcattgcattctggtcttctgccctgtggttctcatgaaaaccagcagagattcatatgatggagctgcacatgaatgtaatttccaatgtccagcattctcctctgttctttatctttagatttaaaaataatgtttctatgaacttattaaaattctagaatactatgaatctactgggtcttttcacatccttttgctactagtagaaaaaagaatagtaataattttcagaggctactgtccagtatgtgacataaattgtctcccatgtttctctgctcatgcaattactgagtatgatttattttattttaatttcagcaccacctgagaaaagccctgtggtccaggattgctaccatggtgatggacggagttatcgaggcatatcctccaccactgtcacaggaaggacctgtcaatcttggtcatctatgataccacactggcatcagaggaccccagaaaactacccaaatgcgtatgtatttgattaaaaccataagaggagcaacagccaactcaaatattggttagaagacccatgctttaagctcacttcctagggacaaatttctcttagactcacattttggcaaaatgtctcaggacctttgcttttgagcaaagagtctaagagaagagaaattttaggcctgctatttttcctaatagttttatggaaggagtagaatatacggaagtggcgaagtcatattaatgtaaagctcagaagataaatgaccaaagcttaaacacagcaccattccacaatgcccactaaaaatcaatgtcatctttcactcgtgcaattctgtcattctaaatttcaattcccgaaggtttgtttgccatttttgtcatgggtaataagtaaaaaaaaaaaaattaagatgtgtatatatatatatatatatatatatatacacacacacacacacacacaaacatctgaatatttatatatatgtctgaatatttatatacttgtgtataaaacttatatttaaatttttgcataaatttatatatttttaatatttcattaaaaattatattgtttcactatgtatgtctgagtatttttatatattttaatataacattttaaatatttatatataaatattcaggtatgtaactgaatattcatttacacacacaaatatatgtgtgcatgtgtgtatatatatatatacccatatatatatatatatatatatatacatatatatatatatatatatatgtatatatatatatatatatatatatacacacacacacacacacacatacatacaggtataaacacactgggcctgaagcaccagtggtctgaaaggacatgtgttgccaggacttgaagagcaaaagcaggaaggcggatgagagtcaggaggtacacaaacgctgaaaagtaaaatggacaagtacatggacaaaaagcaggtataagcataacagccttttggaagtaaatgactataaaatatatgaaaatactgttttcacaagttgcacaacagatagtagtgtattgagataatttagaacagaaaacaaatgtgatcaaccccataagtgtgctgtatttcatcatggattgaaggaaaaagagatggagcccaagaagaccacagcagtcttgatgaactgagagacaccagagtttgggattacaaaggcagctgggattttctacacttggtaataatgagaaagaatttgtggagataaagagctacagtcatgtacctagaagtcacctcagtgtaatataaatctgcatatgcacagggagtgattccacaatgaaagtaggacaaagaacagctactggggaaagaataactacaagggaacaatgagttcaatggagatggcagagctcacaaagcactgggggatatttgagttcttaccagctagaaaagagacctcattgcaaatcttgggcattcagtagagaccccagaaaagccactctttggaaacagagttgatgtattttaagagcaaaatctactccacaaaaatcctagcaaaattgaaaagcaagtcagaaagaccaaaatcctctcaacataaattagttgcccatcagaagaaagcttaacctcttcataggtaaacaataaaatcaaattgctcagttatctggcatccacaatatgtgacataaatttaaaaatttactagacatacaagaagcatttagtgtgatccataaccaggagaaaaatcattcaatacaaatagacccagaaatgacagaaatgatagaattagcaaaaacatttaaaatatacatatgatcatttgatcttgtgatcagatatcacaagagaagaaagagatacttgaacagaaaaaatgcctgaagcaatgatggctgaaaactttccaaatatgaagaaaaaaaagctcacagattcaagaaaactaatcaatcagaaatatgattttgaaaagtaaaaatgtatgatttactttggcaaatcttcttggttaaattgtctaaaatcaaagaaagctaggaaaattttataagccagaggaaaaaagattgtttatataaaggaacagttacacaaatgactgatgccttctcatcagaaacaatgaaagtcagaaacaataaagtaacatctttaaagtaatagaagaaaaacccaagaggtgagggatcgtggcagacaggaggcaggactagattgcagctctggacagagcagcatgcagaggctcatattgtgaattttagccccatattgactgcaagaacagaccagcaatcctgagaggacccacagaccgtgtgaaggaagcagactgctcctgcaggataagggagacaccccaaatactgtgagttccccaactgcagaagtggaaaagggaggccttactccctcaaacacaccccacaactggagaagctgaaagtctgtttgcaggagaagttcccaactttacctgggcctcagtaaatttagagagctgagccaagcaaaatataggggtagaggaagcagcagagaagacctcagagcttgctggatccccaagcagctcattcctgcctggcaccacagagatccatcagaagtgtggccaaaggaacagagggtaaaactccacatggaggactgctctacctgaactttctaacaatttgaacagggggagaagcctcctggccagaacttgggggagggcatgaatctggtttgcagacttcacaggtgggggaaggactaaagcccttttctttcacagctgggaggtggaaagcctcaggcaagttttcaagcctgactttccccccacctggaaacagacttggagctgttgcggggttgggggcatggtgggagtaagaccagcccttcagtttgcatgggtgctgggtgaggcctgtgactgacagcttccctccacttccccgacaactcagatgactcagcagaggcagccataatcctcctaggtacacaactccagtgacctgggaacttcacccccacaccatacagaagcttcagtaagacgtgcccaaggaaagtctgagctcagacacgcctagtcccacccccaactgatggtccttccctacccaccctggtagcagaagacaaagagcatataatctttggagttctagggcccacccacctctagtccctctccacactagtatagctgatgcaggaggccaaccagcacaaaaatagagcattaaaccaccaaagctaggaacccctatggagtccattgcaccctcctccacctccaccagaacaggcactggtatccacagctgagagacccatagatggttcacatcacaggactctgtacagacagtccccagtaccagcccagagctgggtagacttgctaggtggcaagacccagaagacaggcaataatcactgcagttcagctcacaggaagccacatccataggaaaagagggagagtactacatcaagggaacaccccatgggataaaaacatctgaacaacagccttcagccctaccttccctctgacacagtctacccaaatgagaaggaaccagaaaaccaaccctggtaatatgacaaaacaaggctcatcacactcccagttcaccagcaatggatccaaaccaagaagaaatccctgatttacctgaaagagaattcaggaggttagttattaagctaatcagggagggaccagagaaaggcaaagcccaatgcaaggaaatccaaaaaaaaaaaggtataagaagtaaaaggtgaaatattcaacaaaatagatagcttaataaaaaaacaataaaaaattcagtagactttggacacacctttggaaatgtgacatgctctggaaagtctcagcaatagaactgaacaagtagaaaaaataaattcagagctcaaagacaaggacttcaaattaacccaatccaacaaagacaaagaataaaggataagaaaatatgaacaaagccttcaagatgtctgggattatgttaaatgaccaaatataagaataatcgtggctcctgaggaaaaagacaatactaaaagcttggaaaacatatttgggggaataactggggaaaacttacctggccttgctggacacctagacatgcaaatacaagaaacacaaagaacatgtaaatacaagcagcacaaagaacacctgggaaattcatcacaaaaagatcttagcctaggcacattctcatcaggttatgcaaagttaagacgaaggcaagaatcttaagagctgtgagacagaagcaccaggtaatgtataaaggaaaccctatcagattaacagccagtttttcagcaggaactgtacaagctataaaggattggagccctatcatagcctcctcaaacaaaacaattatcagtcaagaattttgtatccagcgaaagtaagcatcatatatgaaggaaagatacagtcgtttttggacaaacaaatgctaagagaattcaccattaccaagtcaccactagaagaactgctaaaaggagctctaaatcttgaaacaaatcctagaaacacatgaaaacagaatctctttaaagcataaatcacacaggacctataaaacaaaagtacaagttaaaaaacaaaaacaaaaaacaaaaccaaagtacggaggcaataaagaatatgatgaatgcagtggcacctcacatttcaatgctaaaattgaatctaaatggcctaaatgctccacttaaaggatacaaaaagagttggtggctggcaagatggctgaataggaacagctccagtctgccgctccccgtgagatcaacacatagggtgggtcatttctgcatttccaaccaaggtacccggctcatctcattgggactggttagacagtgggtgcagcccacagagggtgacctgaagcagggtggggtgtcacctcacctgggaagtggaaggggtcagggaactccctcccctagccaaaggaagccgtgagggactgtgccgtgaagaccagtgcattctggcacaaatactatgcttttcccacggtctttgcaacctgaagaccaggagattcccttgggtgcctacaccaccagggccctggatttcaagcccaaaactgggctggcatttgggcagacactaagctagctgcaggagttttttttcataccccagtggtccctggaatgccagcaagacagaaccattcacccccgtgaagaaagggctgaagccagggagctaagtggtctttctcagtggatcccacccccatggagcccagcaagctaagctccactggcttgaaattcttgctgccagcacagcagtctgaagttgacctgggacgctcaagcttggtgggaggaggggtatccacaaatactggggcttgagtaggaggttttcccctcacagtgtaagcaaaaccgctaggaagtttgaactgggcagggtgcactgcagcttggcaaagccattgtagcaagagtgcctctctagattcctcctctctgggcagggcatctctgaaagaaaggcagcagccccagtcagaagcttatagataaaactcccatctccctgggacagagcaactggaggaaggggtggctgtgagtgcagctccagcagacttagtttcctgcctgccagctctgaaaagagcaccagatcccccaacacagcactagagctctgataagggacagactgcctcctcaagtgggtcctggtttcagaagataataagaaactcctctgagctaaaggagcatgttctaacacaatgcaaggaagctaagaaccttgaaaaaggtcagaggaattgctaactacagtaagcagtttagagaagaacataaatgaccttagggagctgaaaaacacagcacgagaacttcatgacacatacacaagtatcaatagcaaaatcgatcaagtggaagaaaggatatcagagattgaaaatcaacttaatgaagtaaagcgtgaaaacaagattaaggaataaagaatgaaaaggaatgaacaaatcctccaagtatgggactatgtgaaaagattgaacctacgtttgattggtgtacctgaaagtgatgggagaatggaaccaagttggaaaacactcttcaggatattatccaggagaacttccccaacctagcaagacaggccaacattcaaattaaggaaatacagagaataccacattcaaattcaggaaatacagagaacaccacaaagatactcctcaagaagagcaacctgaagacacataatcgtcagattcaccaaggttgaaatgaaggaaaaaaatgttgagggcagccagagagaaagtttgggttacccacaaagggaaccccatcagactaacagtggatcttcctgcagaaactctacaagccagaagagagtgggaggccaatattcaacattcttttttactattattatactttaagttctagggtacatgtgcacaaggtgcaggtttgttacatatgtatacatgtgccatgttggtgtgctgcacccattaactcttcatttacattaggtatatctcctaatactatccctccccactccccccatcccatgacaggccccggtgtgtgatgttccccactctgtgtccatgtactctcattgttcaattcccacctatgagtgagaacattcggtgtttggatttctgtccttgtgatagtttgctgagaatgatggtttccagcttcatccacatccctacaaaggacatgaagtcatccttctttatggctgcatagtattccatggtgtatatgtgccacattttcttaatccagtctaccattgatggacgtttgtgttggttccaagtctttgctattgtgaatagtgccgcaataaacatatgtgtgcatgtgtctttatagcagcatgatttataatcctttagatatatatccagtaattgtatggctgtgtcaaatggtatttctagttctaaatccttgaggaatcaccgcactgtcttccacaatggttgaactagtttacagtcccaccaccagtgtaaaaatgttcctatttctccacatcctctctagcatctgttgtttcctgactttttaatgatcaccattctaactggtatgagatggtatctcattgtggttttgatttgcatttctctgatggccagtgatggtgagcactttttcatgtgtctcttgactgcataaaagttttcttttgagaattgtctgttaatatcctttgccaactttttgatggggttgtttgattttttttcttgtaaatttgtttatgttctttgtagattctggatattagccctttgtcagatgggtagattgtaaaaattttctcccattctgtagcttgcctgttcattctgagggtagtttcttttgctgtgcagaagctctttagtttaattagatcccattggtcaattttggcttttgttgctattgcttttggtgatttagtcatgaagtccttgcccatgcctatgtcctgaatggtattgcttaggttttcttctagggtttatatggttttaggtctaacatttaagtctttaatccatcttgaattaatttttatataaggtgtaaggaagggatccagtttcagctttctacatatggctaggcagttttcccagcaccatgtattaaatagggaaacctttccctatttcttgtttttgtcaggtttgtcatagatcagatggttgtagatgtgtggtattatttctgagggctctgttctgttccattggtctatatctctgttttggtaccagtaccatgctgttttggttactgtagccttgtaatgtagtttgaagtcaggcagagtgatgcctccagctttgcttttttggcttaggattgtcttggcaatgcatgctcttttttgttccatatgaactttaaagtagttttttccaattctgtgaagaaagtcattggtagcttgatggggatggcattgaatctataaattaccttaggcagtatggccattttcacaatattgattcttcctatccatgagcatggaatgttcttccatttgtttgtgtcctcttttatttcattaagcagtggtttgtagttctccttgaagaggtccttcccatcccttgtaagttggattcctaggtattttattctctttgaagcaattgtgaatgggagttcatccatgtccctacaaaggacatgaagtcatgtatgggaatgcttgtgatttttgcacattgattttgtatcttgagactttgctgaagttgcttatcagcttaaggagattttggtctgagaagatggggttttctaaatatacaatcatgtcatctgcaaacagggacaatttaacttcctcttttcctaactgaataccctttatttccttctcctgcctaattgccctggccagaacttccaacactatgttgaataggagtggtgagagagggcatccctgtcttgtgccagttttcaaagggaatgcttccagtttttgcccattcagtatgatattggctatgggtttgtcataaatagctcttattattttgagatatgtcccatcaatacatagtttattgagagttcagcatggagagctgttgaattttgtcaaaggccttttctgcatctattgagataatcatgtggtttttgtctttggttctgtttatatgatggattacatttattgatttgcatatgttgaaccagccttgcatcccagggataaagccaacttgatcatggtggataagctttttgatgtgctgctggattcggtttgccagtattttattgaggatttttgcatcaatgttcatcatggatgttggtctaaaattctcatttttgttgtgtctctgccaggatttggtatcaggatgatgctggcctcataaaatgagttagggaggattccctctttttctatgattggaatagtttcagaagaattggtaccagctcctctttgtatctgtggtagaattcggctatgaatctctcctggactttttttggttggtaggctcttaattattgcctcaatttcagagcctgttattggtctattcaaggattcaatttctttctggtttagtcttggtagggtgtatgtgtccaggaatttttccatttcttctagattttctagtttatttgcacagaggtgtttataatattctctgatggtagtttgtatttctgtgggattggtagtgatatcccctttatcattttttattgcatctatttgattcttctctcttttcttctttattagtcttgctagtggtctatcaattttgttgatcttttcaaaaaaccagctcctggattcattgatgttttgaaggtttttttgtgtctctatctccttcagttctgctctggtcttagttatttcttgccttctgctagctttttaatgtgtttgctcttgcttctctagttcttttaatggtgatgttagggtgtcaattttagatctttcctgctttctcttgtgggcatttagtgctgtaaatctccccctacacactgctttaaatgtgtcccagagattctggtatgttgtgtctttgttgtcattggtttcaaagaatatctttatttctgccttcatttcgttacatacccagtagtcactcaggtgcaggttgttcagtttccatatagttgagcagtttttaatgagtttcttaatcctgagtcctagtttgattgcactgtggtctgagagacagtttgttataatttctgttcttttacatttgctgaggaatgcctcacttccaactatctggtcaatttcagaataagtgcgatgtggtgctgagaagaatgtatattctgttgatttggggtggagagttctgtagatgtctattaggtctgcttggtgcagagctgagttcaattcctggatatccatgttaactttctgtctcattgatctgtctaatgttgacagtggggtgttaaagtctcccattattattgtgtgggagtctaagtctctttgtaggtctctaaggacttgctttatgaatctaggtgctcctgtattgggtgcatatatatttaggatagttagctcttcttgttaaattggtccctttaccattatgtaatggccttctttgtctcttttgatctttgttagtttaaagtctgttttatcagagactaggattgcaacccctgctttttttgttgttttccatttgcttggtagatcttcctccatccctttattttgagcctatgtgtgtctctgcacgtgagatgtgtcttcagaatacagcacactgatggatcttgactctttatccaattttccagtctgtgtcttttaattggagcatttagcccatttacatttaaggttaatatttttatgtgtgaatttgatcctgtcatcatgatgttcgctggttattttgctcattagttgatgcagtttcttcctagcatcgatggtttttacaatttggcatgtttgtgcagtggctgataccgattgtttctttccatgtttagtgcttccttcaggagctcttgtaaggcaggcctggtggtgacaaaatctctcagcatttgcttgtctgtaaaggattttatttctccttcacttatgaagcttagtttggctggatatgatattctcagttgaaaattcttttctttaagaatgttgaatattggctgccactctcttctggcttgtagagtttctgctgagagatctgctgttagtctgatgggcttccctttgtgggtaacccgacctttctggtgaatctgacaattatgtgtcttggagttactcttctcgaggagtatttttgtggcattctctgtatttcctgaatttgaatgttggcctgcctttgtaggttggggaagttctcctggataatatcctgaagagtgttttccaacttggttccattctcctcgtcactttcaggtacaccaagcagatgtagatttggtcttttcacatagtcccatatttattggaggctttgttcatttctttttactcctttttttctctaaacttctcttctcgcttcatttcattcatttgatctttaatcactgataccctttcttccacttgattgaatcaactactgaaacttgttcatgtgtcacgtagttctcgtgccatggttttcagctccattagatcatttaaggtcttctctatgctgtttattttagtctgccattcatctaaactttttcaaggtttttagcttctttgcaatgggttcgaacatccttctttagctcggagaaatttgttattacagatcgtctgaagccttcttctctcaactcatcaaagtcattctctgtccagctttgttctgttgctcgtgaggagctgcgttccttcggaggagaagaggcaccctgatttttagaattttcagctgttctgctctggtttctccccatctttgtggtttatctacctttggttcttgatgatggtgatgtacagatggggttttggtgtggatgtcttttctgtttgttagttttccttctaacagtcaggaccctcagctgcaggtctgttggagtttgctggaggtccactccagtccctgtttgcctgggtattaccagtggaggctgcagaacagcaaatattacagaacagcaaatgttgctgcctgattcttcctctggaagcttcatctcagaggggcacccagctgtatgaggtgtcagttggcccctactgggaggtgtcccccagttaggctactcgggggtcacggacccacttgaggaggcagtctgtccattctcagatctcaaactctctgctgggagaaccactactctcttcaaagctgtcagacagggatgtttaagtctgcagaagtttctgctgccttttgttcagctatgccctgcccccagaggtggagtctacagaggcaggcaggtctccttgagctgtggtgggctccacccagtttgagcttcctggtcgctttgtttacctactcaagtctcagcaatggcagacgcccctcccccagctttgctgccgccttgcagttcggtctcagactactgtgctagcagttcaatctcagactgctgtactagcagtgagcaaggctctgtgggcatgggaccctctgagccatgtgcaggatataatctcctggtgtgccgtttgctaagaccattggaaaagtgcaatattagggtgggagtgtcccgattttccgggtacatctgtcatggcttcccttggctaggaaagggaattccctgaccccttacacttcccgggtgaggcaatatcccgccttgcttcggctcactctccgtgggctgcacccactgtctgacaagccccggtgagatgaacccagtacctcagctggaaatgcagaaaccacccatcttctgctttgctcatgctgggaactgtggactggagctgttcctattcggccatcttgaaacctcccctctctcacgatcacaaggtcccacaataggccgtctgcaggctgaggagcaagaaaagccagtctgaattccaaaactgaagaaattggagtctgatgttcaagggcaggaaacatccagtgccaaagaaagatgtagaatattcaacattcttaaagaaaataattttcaacctagaatttcatatccagccaaactaagctttataacaaaggagaagtaaaatcctttacaaacaagcaaatgctgaggaattttgtcaacaccaggcctgccttacaagaggtcctgaagaaaacactaaatatggaaaggaaaaaccagtaacagctactgcaaaaacataccaaattgtaaacaccatcaacactataaagaaactgcatcaactaatgggcaaaatagccagctagcatcataatgacaggatcaaattcacacataacaatattaaccttaaatgtaaatgggctaaatgccccaattaaaagacacagactgggaaattgaataaagagtcaagacccattggtttgctgtgttcagaagacccatctcagggtgaaaagacatacatgggctcaaaataaagaaatgaaggaatatttaccaagcaaatggaaagaaaaaaaaagcagcggttgcaatcttagtctttgatgaaacagactttaaaccatcaaagatcaaaagagacaaaggagggcattacctaatggtaaaagtatcaatgcaacaagaagatctgactgtcctacttatatatgcacccaatacaggagcacccagattaataaagcaagttcttagagacctacaaagagacttagacttccacacaaaaatagtgggagactttaacaccccacagccaatattagatcgacgtgacagaaaattaacaaggatattcaggacgtgaattcagctctggaccaagctgacctaatagacatctacagaactcgacaccacaaatcaacagaatatacattcttctcagcaccacattgcacttattctaaaattgaccacataattggaagtaaaacacttctcagcaaatgccgtagaatggaaatcataacaaacagtctctcagaccaaagtgcaatcaaactagaactcaggattaataaactcactcaaaaccacacaactatatggaaactgaacaacctgctcctgaattactactgggtaaataacaaaattaaggcagaagtagataagttcttagaaaccaaagagaacaaagacacaatgtgccagaatctctggtacacagctaaagccatgtttagagggaaatttatagcactaaatgcccacaggagaaagcgggaaagatctaaaatcaacaccctaacatcacaattcaaagaaccagagaagcaagagcaaacaaatacaaaagctagcagaagacaagaaataactaagatcagagcagaactgaaggggataaagacacgaaaaccctttaaaaaattaataaatccaagagctggttttttgaaaagattaacaaaatacatagaagcctagccagactaataaagaagaaaatagagaagaatcaaatagacacaataaagaataataaaggggatatcaccaatgatgccacagaaatacaaactaccatcagagaatactttaaacacctctatgcaaataaaatagaaaatctaaaagaaatggataaattcctggacacatacaccctcccaagactaaaccaggaagaagtcaaatccctgaatagaccaataacaagttctgaaatcgaggcagtaattaatagcttaccaaccaaaaaaagcccagaccagagggattaacagtcaaatcctaacagaggtacaaagaagagctagtactattccttctgaaactattccacacaatagaaaaagagggactcctgcctaactcattttatgaggccagcatcattctgataccaaaacctggcagagacacaacaagaaaagaaaatttcaggccaacatccctgatgaacatcaatgtgaaaatcctcaataaaatactggcaaactgaatccagcagcacatcaaaaagcttatccaccatgatcaagttggcttcatccctgggatgcaaggctggttcaacatattcaaatcaataaacataatccatcacataaacagaaccaatgacaaaaaccgtatgattatcgcaatagacgcagaaaaggcctttgataaaattcaatacccaatcatgctaaaaactcttaataaactaggtattgatggagcatgtctcaaaataataagagctacttatgacaaatgcatagccaatatcatactgaatgagcagaagctggaagcattccctttgaaaaccagcacaagacaaggatgccctctctcaccactcctattcaacatagtattggaaattctgtccagggcaatcaggcaagagaaagaaataaaggtattcaagtgggaagagagggagtcaaattatttctctttgcagatgacatgattgtatatttagaaaactctatcatctcagcccaaaatctccttaagctgataagcaacttcagcaaagtctcaggatacaaaatcaatgtgcaaaaatcacaagcattcctatacaccaataagagacacagagccaaatcctgagtgaattcccattcacaattgctacaaagagaataaaatatacctaggaatccaacttacaagggatgtgaaggacctcttcaaggagaactacaaaccactgctcaaggaaataagataggacacaaacaaatggaaaaacattccatgctaatggattggaagaatcaatattgtgaaaattgccatactgcccaaagtgatttatagattcaatgttatccccatcaagctaccattgatttcttcacataattagaaaaaactactttcaatttcatatggaatagaaaaagggcctgtatatccaagacaacctaagcaaaaagaacaaagctggaggcatcatgctatctgacttcaaaatatactacaaggctacagtaacaaaaacagcatggtatggtactggtaccaaaacagatatatagaccaatagaacagaacagaggcctcagaaataacaccacacatctacaactattggatctttgacaaactggacaaaaataagcaatggggaaaggattccctatttaataaatggtgttgggaaaactggctagccatatgcagaaaactgaaactggatcccttccttacaccttatacacaaattaactcaagatagattaaagaattaaatgtaagacctaaaaccataaaaaccctagaagacactttgggaggccgaggtggatggatcacgaggtcaggagatcgagaccatcttggctaacacagtgaaagcccatctctactaaaaatacaaaaaattagctgggtgtggtcgtgggcacctgtagtcccagctacttgggaggctgaggcaggagaatggcatgagctgaggaggttgagcttgcagcaagccaagattgtgccactgcactccagcctgggcaacagagtgagactccatcaaaaaaacaaaaacaaaaacaaaaaatcaaaccctagaagaaaacataggcaataccattcaggacataggcatgggagaagacttcatgactaaaacagcaaaaccaatggcaacaaaagccaaaatttacaaatcagatctaattaaaataaagagcttctgcacagcaaaaaactctcatcagagtgaaaaagcaacctatggagaaaaattctgtggtctagccatctgacaaagggctaatgtttagaatgtacaagcaacttaaacaaatgtacaagaaaaaaaaaacaaccccatcaaaaagtgggcaaaggatatgaacagacacttctgacaggaagacctttatgtggctgacaaacatgaaaaaagctcatcatcactgttaattagagaaatgcaaatcgaaaccacaatgagataccatctcatgcccgttagaatggcgatcattaaaaagtcaggaaacaacagatgctgaagaggatgtgtggagaaagaggaacacatttacactgttggtgggagtgtaaattagttcaaccattgtggaagacagtgcggtgattcctcaaggatctagaaccagaagtaccatttgacccagcaatcccattactgggtatatacccaaaggattataaatcattctacaataaagacacatgcacacgtatgtttattgtagcactattcacaatagcaaagacttggaaccaactgaaatgcccatcaatgatagactggataaagaaaatgtggcacatatacactgtggaatactatgcagccataaaacaggatgagttcatgtcttttgcagggacatggatgaagctggaaaccatcattctcagcaaactaacacaagaacagaaaaccaaacaccatatgttctcactcataagtgtgagttgaacaatgagaacacatggacacaggaaggggaacatcacacacaggggcctgttggggagttgaggctaggggagggattggattaggagaaatacctaatgtagatgatgggttgctgggtgcagcaaaccaccatgacacgtgtatacctatgtaacaaacccacacattctacacatgtatctcagaacttaaagtataataataataagatacagaactgcagaatgaataagaactcaccaaccatctgctgccttcaggagactcatttaagacataaggactcacataaacttaaagtaaatgggtggaaataataataagtggtgtcactgatgtggaggtagattataaaactcttatcatatgctggtggaagatcaaaatgataaaacgaattaaaaaatcagtcagatggtttcttaaaaagttccatcaatatgcctctatcttacaaacctgcaattctattcctgaatctttatcccaaggaaatgaaaaagtaagtccacaaagagttctatatgaatatttataggagctttatttattataattcaaactgtaaaaataatttcaatgttcatcaataacaaaatgaaaaaataatttgcaacctactggtacacttgaatactattcagcactgagtatcttaaatagcatggatggagctcaaaaatatactcaggaaagaagccatgtatattctgtatgagttcatttacatgagatcatttacatttcctccaaaagaggaaaaactaatttctgttgaaagaaaccaatgtatttgcctctggcagtggtaagggggtagcacagattaattgggtagggactcaagagagtttctggggtcacagaaatgttccgtgtggtgatgggagtttgggctccacaggtataggtgttgatccaaaatcatcaaaaaaacaacattgcagatctgtgcatctcactctgtgggaaagtatatctcaactgtaaaaagggcagaaattgcttttaaacgctcagccttttagcacatccagttgcttggagaaccagcttactcaaatgggggtctaggctggagactaggtcacaggcatagagtctctaaactttcccatggcacataatacgtttcaggttttctcagagagctgcaggttagtaatctgaggattctgacaagttgggtcaacgttcctaggaggcatgaatgggagtgcattctctaagatccctccaccccagggtccttgctttctgtgcctcttactccattgttttctgactcctctgtagccactcgacctcttcagatcccattgtctacccagccatcgccctttatgacttgggtcccactgttctttcatctcatcctccattccctcagtttcggagtggctgccgctagcagaggatggactgagagcaggagaggtggtcctgcccaggaacccatcctagagaaatggcatcctgtctgggagctagttttttagggcaggttttataagtcttgtaaagccagacacacttgatctacctggtatgttatttacagtaatactattttcataattgcttttcactctaaaagtagagccttttagctacactgtgagtaaataaaggggctggcctgggaatggtatcatgttggatgttgtttcttccctgaagtaatatatatcagttacaatttacatgttactgcagagtcctagagagagacacagagaatgagacagataccaatacatttttatgtgcattaaaaaaatctaaggccaggcgcagtggctcacacctgtaatcccagcactttgggaggccgaggtgggtggatcacgaggtcaggagattgagaccatcctggctaacacggtgaaaccctgtctctactaaaaatacaaaaaattagccaggcgtggtggcgggcgcctgtagtcccagctactcaggagactgaggcaggagaatggcttgaacccaggaggcagaccttgcagtgagccgagattgcgccactgcactccagtctgggcgacagagcgagactccgtcacaaaaaaaaaaaaaaatctaaaatgcactcttcaaaatctatgtcatttattctggaggaatgcagttggcagaaggaggaagatattccgaatttttcttgtatacatttatgtatgatctcagtttttttatggatcatagaccaattttgatattttaaaataaaaattataatctatcttggaaatttacatggttctttagaacttgaggaccgtttttgcttttcggaatattattgtacctaaaatgggaatattacaacgtcactttttaacactttgttataacaaagtttagacagcgctgggtgcccctgaattttttcccgcctcttgtgacctgtgttgttttggaatttgcagtggcctgaccgagaactactgcaggaatccagattctgggaaacaaccctggtgttacacaaccgatccgtgtgtgaggtgggagtactgcaatctgacacaatgctcagaaacagaatcaggtgtcctagagactcccactgttgttccagttccaagcatggaggctcattctgaagcaggtaagaagtctgtggccagatatctacacatttgaacattgggatgaaaagagatggaaaatctgactgatgcagaagccttccatgctacacagaaacttgagggtatggcaggtggaaagaagcctcagcactctctctggtggagcaatttttggcgcaacgtgcgtgggcggtgacttcaggaatggtgcaaacccacctgggcacttgacttaccactcactttgttatgaaaggggttatctcggtgttccagacaaaattccaattctaacatcaggccaaatttgtgccaaatttcacactagtgagtgtttccaggcatttattaaaatggacagtgttcattgcaatcttcagcattgcagttgctgaggtatgtggccgctgagtttgtcatcctggggaaacctaatatgatgatatttattccatctaatcctggggctatttggcagtaaataccacagaatacactatttctctggcttatttcagtcttaggtaggctctgcacacctatgcttggaaggcaggaatttcttggtgttcttgtgccttcttctcatggaacgtgcatctttggtgtgtgttgagaggaagggtagtagacttctgctttgttgcaatgcaggatgctggaacaagaggattccctgtctctactgtaagggaataagattttagcctccatccttctctaagaagcaatgtgtctttgcctccaagtactagatgcaggaccatgaactgccccgtccaccagaagcttaaggctttggcttttcaggagcaatcatctagggaactgtgcagggttttcatgtctgtcccctactgacagccaatcaccatacagcctgcataacctaatccatcatcgtctggtttcctgcctcattgttttcatgaacaaccagtagagagccatacgaaagagcttgcacatgagtctttgttccaattgtaagagcactgataggtccttttcccaccaggttttgaatataaaatttctaagaacttattaaaatattagaatgttattaatctattgtttttgcttcagcatgtccttctgcttgtgagtatactaaagagaacagtcataattctgaaactactgtcctgtttgtgtcataaattgcttcacatgtttctgcatactagtagttactcagcttgattttgtctattttcagcaccaactgagcaaacccctgtggtccggcagtgctaccatggtaatggccagagttatcgaggcacattctccaccactgtcacaggaaggacatgtcaatcttggtcatccatgacaccacaccggcatcagaggaccccagaaaactacccaaatgagtatgtctttgatgttacttgtaagaggagcaacagccaacttaagttcctcctagaagagccttgcttcaagctaacttgttaggacaaatttcccttagacccagaaggtgtgtcaaaatgtccagacaactttgcttttgatcaaagagtctgagagaataggtattttaggcttgctatcttttctaatagtctgatggaagcagaaggctacatggagctgatgaggtctttttaatataaagctcaagagatcaaatgatcaaatacttagagtgccattctacaaggctcataaaagatcaatgcactctttcacccatgcaattctatcattctaacctcccttctctgaaatgaaggctttttgccatttttgtcatgggtcacaagtaaataattcacatgtatatgagtatatatataaccaggtgtgtttattcagactagtatgtatatatatacatatatatgttcatataagttagtattcatatatatgttcatatatatatgttcatacagactagtattcatatatatatacatatatatatacacacacatatatatatatatatatatgttctagggaaacatgcaaggtttttatgtctgtccctgactgatgaccaaataccctatagcctgcacagctgcaagctgtatagccatacaatttgcaggacacacacacatacacacacacacacacacacacacacactaacatataatataatataatataatataatataatataatataatataatataattaatatatataaacctgtgtgaacacactgggttctaagctccagttttctgaagggatatgggttgccaggagaggaagagcaaaagcaagaatgtagatgagaattaggaagtaaacagatatggagattaaaatgggcaggtacatggacaaaaaaccaggtctgacaaaaactggctttctgccataaatgactataaaagatattaaaaaacactttccacatgttggacaagagacagtacaggactgagataatttagaaaaggaaatgaatgagcgcaactccgtaactattatgactttcttcctggagaaccttcctggactgaagggcaaggaattggagccaaagccaaccacagcagtcttgctgaactgaggaaagagactggagtttgggatagctaagaaaatgtgtattttctatgctaggtaataatgagaaagaatttgtggtgaaaaggagctgaaggaatatgcatggaagtctaatataaactgcatatgcacagggagaaattctacaaagtgggacagagaaccactactggggaaaggacaaattcagggaaacagtgagctcaatggtgacgccagagctcacgtagcactgggggataccggggttctgatcagcccgaggagagacacctcattgaacatctcgggcattcagtagagaccccagaaaagtcatactttaggagtaggatttatgccttcttagaataaagactaccccagaaacaccctagtaaagcttaaaaaccaagtctaaaaggacccaaatgatctccaagtaaattaactgcctgacagaagaaaactcaaccatcactggaggtaaataacatgattacagtgctctgtaatgttgcattcacaaggagtgacatcatttaaaaatttatgaggcaggaaaaagcaattagtgtgatccataactaggagaaaaaccagtcaatacaaatagaccaagaaatagtagaaacgatggaattgacaaagaaattaaaactgtatatatgataattgtgttcaaagatttaaagaaaacatgaacatgagggaaacaaatgcagaatataaaaaaaagcaaatgcgtaaaacaaccaaatggaaattaaagaactacaaaaaagtataaccttaataaaatactcactggatggccttaatattagtttatacattacagaagaaaaagtgaaccagaagataactcaatgaaagccatacaatctgtaagacacacacacacgcacacgcgcgcgcgcgcacacacacacacacacagagagagagagagagagaaagagagagagagaaaggctgaaaaaaataaatagaaccttaaggatatcagtgaaaatagcaaaagatttaatatatgggtaaagcaagtcacagaaggacgggaaggagatattgggacagaaaaaaatactcaaagcaatgatggctgaagactttacacgtatgaagaaaatgataaactcacagtcaagaagctcaatgaatcagaaatagtatttttaaaagcaaaactctatgatttacttgggtacattatagataaatcgtccaacatcaaagataacaaggataatcttataagccagaggaaaacaatatcatttacatagagggacagtaatgaaagtgaccgatgccttctccttggaaacaatggcataacatctttaaagtgataaagagaaataaaaacagatcaacctaggacgacatgtccagccaaaacaaacaaataaacaaaaaaaccctttaaaataaacgtgatgtaaatacgtattctgccacctccagaggaaacaagcaaaaaaacaaaagaatgtttccaaggcaggcttctgtattaaaagattttaaggaaagttattcaggtagaagaaaaataataccagatgggaactttaatccatactaagtaatgaagagccctggaaatggcaaatggcaatgtcaatataaaatactcttatttatctaatttttaaatgtatttaaaggacaatttgtgatattaattaaaataataggaatatattgttgtttcaacgtatgtagtagtaaaattcataaaaacagtagcacaaataatgcagatgataactggaagtatactgttaatgagttttttgcattatccatgaagttatataatattaatagatggttgaatgtgatagtttaaggtgggatattataaatcctaggacaaccaaaaaaatttaaactgagaggaatggatagtaagaggaatagtccttttatgcaaaagaaggaagaaaaagaggaataaagaatataaaagatatggtgtaaacagaaaatacatagcattattgtagacacaaactgaactaccttatgagtatattaaatataaaaggattaagcattacaaataaaaggcagagattgtaaattgaataaaaaccacagctaagtgtgttctttttagaataaatactctttaagtgtaaagatctactttaaacaccaaaatatgaaaaaggatatataccatgaaaacctgaatcataaataagctggagtggtgattaatggatgcaggcactcctaaagactaataagtgaatgtggtcaaattgaagaaacaaaagtatatacgtgctcaatgtgcaaaaactttttctgtatacatgctatgatcctttggaaaattaaagttttaaagcaatatcactgacaatagtatcaaaaccaaaaaatatttagtgataaatttcacacactatgctcaaggactatacaccttgcactagaaaacaatgttgaggaaagaattaaaagatctaaatatacaccatgcttatagattaaaagactccatatcagttctcgtgaaattgatctttggatgaaacccacacccaagcactattgcaacagtccttttttggaaaaaaaaattggaggacttatataccttaatataaagacttataaaagtacaggaatcaagacatgtggtattggcctggccccttggctcatgcctgttaccccaacattttgggaggctgagtctggaggatggcttgagcccagatgttcaagaccagccttagcaacagagtgagaccctctctctacaaaaaataaacaattagatcgatgtgatgacttgcacatgtagtttcagctactcggaatgctgaggtgagaggattgcttgactcaggaggtctagccatgagtgagcattgatcatgcctctgcattccagcctggatgatggaatgagacactgtctcaaaaaaaaaaaaaaaaaaggatatgtgttattggccaaaaaagtatgcaaacctaaaaagggatggcccaccaccagacccacatacatatatggtaaatggattttccgtatagatggcaaagcaattcaatggagacaaaaatgttttacaaaatcattctgaaccatttggatatccatgatacaaaacaaaagcagaacttgacttttgcttttcatctcaaattattttgatatctcttccacctaagtgtcagagctaaaactgaacctgaaatatgaaagttccatgaaaaaatataaaatcttcacaaccttggagaaggcaaacttttttgaggcaggagtctgtaaacactcactataaaataaaacaaattataatgtgggctttcatgaaaactcatgcttaccaaaagtcattgttaagaaaataaataggcaagtaacacatgagaagaaaaatgctctctgtccatatatctgacaaatggcttgtgtccagaatataggaacatttctcccactcactaaacagaggacaaacaactaatgggcaacagattgaataggcatttcttggggatagatagatgtacacatagccaataagcacctgaaaaaatgtccagtatctcagccatgaaaaataaagagttataatcatcatgagatgtcaccaaacacccaatggacatggatattattaagaagacaccacagtaactgatgtcactgatgtagagcaaggatgtgaaactctctcatatgctggtgaaagtgcaaaatgatacaaccacttttgaaatcagtctgatagtttctccaaaagttcaataaatgcacttttaccctacaaacctgcaatcctgtttgtgaatatttaccccacagaaatggaaacataagtccacgaagacatctccaagaatattcatagcagctttattttttataaccccaaactgtagacaatttcaatgtcaatcaataagaaaatgaataaataatttgtgaactagtcatacaatggcatactgttcagcaataaaagggagcatgtttttgatactctcaaatagtatggaagatgctcaaaaatattacattaaagaaagatgccagataacaaaaatgaacattatgtatgagtctattgatgtaaggttccagaaaggtaaaactaatttctggtgaaagaaaccaatatcatttgcctctggccatgggaagagagtagcagagattgattgagcagtaaaacgaagtttttttctggggtgatgtaaatgtcctgtattgtgattgaagtgtgagttacacaagtgtacatgttcatcagaagtcatcaaactacatctaagatctgtgcatttgactatacatgaaaatatacctcagttgaaaatagatcaataacctccctcatatactatacttgctaacacagccagctgcttggagaaccagcttgctggaatggagaatctgggcttgagactgggtcacatgtatagagtctctacagagacaatgttgcattcccacggtacataatacatttcaaggtttctcagacagccacatgtcatgaatgtgaggattctgagaggttggagcaacattcctgggaggaacgaaggggagcacattctccaagatcccccaccaccggggtcctcaccggctgtgcttttttttttttttttcttgacagagtctcgctctgtcgccaggcaggagtgtaatggcccaatctcggctgattgcagcctccaactccagggttcaagagattctcctgcctcagcttcatgagtagctgggactacagatgtgcgccactgcgcccagctaatttttgtatttttagtagagacggggttttgccatgttggccaagatggtctcgctctgttgacctcgtgatccacccgccttggcttcccaaagtgctgggattacaggcgtgagccaaagcacccagcctgtgcctctcacttactcaattgtttttctgaaccctccatagctggtggaccttttcagatcccatagtctagccagccctctcactttatgccttgggtcccactgttccttcatctcatcccccttctgtcagtcccgcagtggctgtggccagtagaggatggactgagagtaggagaggaggttctgcccaggaacccatcctagagaaacagcatcctgcctgggacctagtcttccaggtcagcttttataagtcttttagactcaaactcacttgacccacctgaagtggtattgacaataatgctattttcatggttgtttttcactgtaaatgcagagccttttagctacacgactagtacagagagtaagggaggctggcctgggaatgatatcatcttggatggcatttcctccttggagaaatatatgttagttccaactcacatgttactatacagtcctgtagaaagagatacagagagttagacaggtatagacgcatttgtatatgcataacaatctataagacacacatcaaaatccgtataccggttcctctaggggtatgtgcttggcagaaggtagaaggagggtattctggttcctttcttttgcacatttatgtatgatctcagtttttatatggagcattgatagggtttggctatgtccccacccaaaatctcatcttgacttgtaatctctataatcctgataatccccatgtgtcaagggcaggaccaggtggaggtaactggatcatgggggcagtttctcccaggctgttctcatgacagtgagagagtctcctgagatctgatggttttgtaagtgtctggcatttcccctacttgcacttactctgtcctgccgcctgtgaagaaggtgcctgtttctcccttgccttctgccatgactgtaaatttccagaggcctccccagcaatgtggaactgtgagtcaattaaaactcttttctttgtaacttacccagtctgtctcgggtatttcctcatagcaatgtgagaacgggctaatacaagcatatactacttttgatattttaaaataaaaattatcatctatctttgaaaggcatgcacaaatgggaagttgaggaacatttgtgttgtggcaattgtatgatacctttaatgggaatatttcaaagacacttgttaagactttgttagaacaaaatgtagagggtgctggatgtccctgaatattcttccgcctcctgtaacttgtattgctttggaatttccagtggcctgacaatgaactactgcaggaatccagatgccgatacaggcccttggtgttttaccatggaccccagcatcaggtgggagtactgcaacctgacgcgatgctcagacacagaagggactgtggtcgctcctccgactgtcatccaggttccaagcctagggcctccttctgaacaaggtaagaagtctgtgtcttaccttgtctagcacatacctctctatgtgcttggacaacgggatgaaaagacatgaaaaaccacactgatgcagaagcctttagtgctacacgggagctcgagtgttggttgaggttctgccatgaccaaggaagtctcagtgccgtccctgggaaagccagagctgtgatttttggcacaacttgtgggagtagtgactttaggactggcgcaaaacctccagggtgctcaacttaaccactcaccttattctaaaatgggttatttcagtgtcccagtcaaattcctattctaacatgctgtcaactgtgtgattatttccaagccaataagcatttccagtaatttcttaaaatagtgttcattgcagtcttcagcgttgtggctcctgagggatgtggcccctgattctgtcgtcctagagaagcctgacatgactgcattgattctgtatcgtcctgggtctatgtggctgcctggctgtctgtaatcatctgttttatttttatttttttctacagactgtatgtttgggaatgggaaaggataccggggcaagaaggcaaccactgttactgggacgccatgccaggaatgggctgcccaggagccccatagacacagcacgttcattccagggacaaataaatgggcaggtctggaaaaaaatgtaagccactttgatttggactctttttccctttgctgacaaatcttttcaaacagaagaggggcagaggaaaatactggaaagacttcaggaggctaagcgtaattagccttagcatggaaagtgcaagcagcacaggccagcaaagccccacgcgtgtgggggttctcaggcctcttctcttttgacatttctttactgtttccattgttgggtgctgtttctcgtttctagtgcttgtcctctaagccaggggtccccactccagtactggtactggtactggtactggaactggtaattatctgtggcctgttaggaactgggctgcacagcaggaggtgagcttcgggggagcaaacaaagcttcatctgtattttctgctgcttcccatcactctcatagctgcctgagctctgccagctgtcagatcagaggcagcattagattatcatagcacaaaccctattgtgaactgcacatgtgaggaatctagattgcatgctccttatgagaatctaatgcctgatgatctgtcatgcttccatcacccccagatgggaccacctacttgcaggaaaattagctcagggctcccactgattttaccttatggtgagatgcacatttatttcattatatattacaatgtaataataattgaaataaagtgcacgataaatggaaggtacttgagtcatcctttaaccatcgccccctcaccccaggtgcacagaaaaattgccttttatgaaactggtctctggtgccaaaaaagttggggaaccacactgctctgggttctagtagtcagagatgccctctatgaggcttaagtcagatttttctagaaaagatttggatgggccatcaggtcaccatgagacttcccttagcctcatgcattctctgtgatggtttactttggggcctatgaatagggaagactgagatataggaaaaaccaaagtgtctgtgttcccccactctcacacccatgtaacataacacttctcacaccagatatggggggatttctcctcacaccccaagcgagtctccagcagataccagctgggtgtcctacaatgtaactcggtcctgacactctatctggagacagtgtcagatcccacaagttaaggctcagtcctacaagactgccccactgcagatgccaatcccaagttgcaggctgtgacctgtacttctgcccagctggataaagatctgtttttctatatgaccctccatgggtttgattactttgctagagtggctcacagaactcagggaaacacgttacttttatttacccatttattataaaagatattaaaaaggatcctggtgaacagccaggtggaagagatgcacagggcaaggcacgtgggaaggggctcagagcctctatgccctctccagtgcaccagtccccagtaccctaagtgttcagcaacccagaagctctccaagtgcagtcttgttgggtttttatggaggcttcattacagaggcacagttgattacatcattggccatcggtgatcggctcaccttcggcccctcttccctccctggaggttggagggtggggctgaacagttccaaccctcaagtcacatggttggttcccttggcaaccagcccctggggctatccaggaacccaccaagagttgcttcattgcagctcccttcacccaggaaactccaagggatttaggagctctgtgttaagaactggggggcagagacccaatatacatttcttattctatcacaatatcacaggaagctaaggatgatactgcctttgtgtgtcttggctgtggatggtgcataatgcatggaagtaagcatttctgaatcaacagcaaacaggctttatcaggtagaagacccctcagcgccccagggacaaagctcatcaatgatgtcccactgtcctctgaggctctagctctaagacctccagtgggtcaagctcctggagaagtggcacattctccaaagacccttcagggtcaccacaccctggttaagggtgtggcctcataactccttttgactatgactgatggcttacagcatagaaagaaataactttgtcaaaaaatataataatgatagaaaggaagaaggaacgctcccttttgtcttctaagaatagatgtgaaatgtgtgtgccttagaatatcttctccctctcctgctccacgtgagctggagcttacatgcctgcttgttttcagtactgccgtaaccctgatggtgacatcaatggtccctggtgctacacaatgaatccaagaaaactttttgactactgtgatatccctctctgtggtaagttgccttctgttttggtaaggaaactgcttccttaatatggatttggaaaaaaaaaagcaaaaaaaacagaaaatggcttttgagctgagtgcttctggggaggagatggctgccctctccaccagagcctgcttttcatcatggccaccttgaacctgccctactattggccccatttgttaggaaaacacccgcccctcccaccacacacacataaataaaataaatgtcaaattcccaaagggcaaacttagaggtgatctaatcagcccgggatagtcccaccgaacccttctttgtctagcgtgggatgcatgaaaaacaaatttagagtcattatgatgaaaaactgtcctcttctgcagctgagaagaaaaaaaaaatacgagcagcaggaaacagctaagcatgtaatgcacattgtaaacctcagatggccatcctaggaaatcaatgaagggtagtgcagctctttagccccagatggcctttctcgtaagattactactcatgagtcccattagcgacattgcttagagactgcttgttaggttccttcctcattgctctgagactcttattgggagtatgaggcttggatcaggggaaggggaattgacattagatcttaaatgattggggtaacaaatccatgggggaaaaaaagccacttgtacttgttccctattttcttcctgctgaccaatcaacttgtctgtccgagttacagaacaccaccctggacttttcttttgtgtaatttggttgcttgtggttgggtctgccatgtgaagggaccttgagctgggggaagaaggttggcctccaagtccactgaagaccagcatcctgagattgcctggggaggtggtacagggcagtgatgaagatcatgggagccacactgcccatcgtcacatttgggccactcctggggagagcaagagggaagaaggagaggttagggtgataggaaagattctacttggccaatattattataatgtggcattgtggtctctggatttagtgtgagttgatagctgacttttttctcgagtgggtgcttttgttctattttgtcggtgctattgcagaagcatcttggtggttcctctacctcaaagtctcttgatggggtcagttccagttctccgcttctggccccatctagtacacgccactgcctctcactgcctgggctctctatccttgacaggctgccttgaatttaagcccagtctgacttacctgcctcaaacacccacagtagtgcctgggactcatgcacctttgactcccatggaagggaagtgcagtagcttcccaggtgcaattctgctgtcctcacccacattgaggatgtatgagaatcaggttcttagagattggagaaagaaggaagaatgggaacaagatttcttccaatggactgtgaggttccccaccttactttgatgtaagacaagtgaggttaaccccaagcctggtgaggagggttcccatcagacacttggaaatcctgaggactgtttcctgcagaaggatgtggttggtgggatattcaggtttgactcatgattgagaaagttagagcctctggttggagaaagagtttaataactatttcatttccaccaacacattcagtacgaataataaataagtaaaaataaatagaaacattcagttttattttgaatagtaggagtagggtataatttctgtagttactcttttagtacaatgatgcatgtttactgtatgtaaggcatactagcagaaattgagctcagcactagaaaagatgattgcattccatgccatgcttcttttttacaaaagacttctatagatagattctcaaaacaacccacagcaaatgaaaagttatttggaaaactcaggttccagattcactggagtgtagaatctctggttggttggggaggaatttcctcttgcagttgttattaataattatatgaataattattaactatattaatatttatagttttgaagaccttgaagggctggagacaacagagaagcatttttgaacaccctctgtagcccctgcactgttgtaggcattgatgggtggtaccaaagatgggacactttccctacctccagagaccttgtgggcttgctgcagagagaaggcagggaggaggaaaagaagaatagaggcacatgtgtgtaaattacccccacagcagtcagttagtcatgggaggctccccagaagaactgtcctgaagctggctgagagaaggcaacatttcaacataggacagttatccttgctacataaaatcacatacacacatgcacatatgtccacacacagagactcacatgcaaaagaatcctttgtgcctttcagtaaactttacatggtttagaaagaacttatatttccttgaaaggagagtgtcctttgttgtttactaccactttttaaacttagaaagaaaaatctaaagagtgtttatgattttaccatttaatttcacctttgagatgtgaaaaactagtgcttggaattcgtcctgaattaaacgacacaattgctaacttggactcaaatgcgacttcttttcccaccttgtgccacagcatcctcttcatttgattgtgggaagcctcaagtggagccgaagaaatgtcctggaagcattgtaggggggtgtgtggcccacccacattcctggccctggcaagtcagtctcagaacaaggtaagaacaggcccagaaaccatctatactgtccttccatgtaagccccacaaaacccttctacatttacacagaacccacacagctgatgcatcaatacctgcctctctgttttctgaaggaggaaaaaatatagaaaaattaaaaaaagttatattattataggttctctacttggaaaatagccaaaatacaaatctttttcttgatctgggcagttccatcaaaatctgtaggcacagtgatttgcaccaagttccaatacttttggaaaatattgaagatgctctgagggtttctatggatatccattgtctcactgtcagatgaaaagaaagggaagtttttagaaatgtgacactttgcagtgagggaggacaagagcaaacttacctacagtctatcacaggcacagatttttttttacacttttgtgaatcattgaattcaatgccgaggctattcatctattcacaaacacatgaacaaattatgggttgtgatccccataaatgaagagtaatcagtccgaacccacagaacctggacattttgggtatcgtttcagtggaacatgcaattcgtaagttcagtttgcttgggtgtctcttaggaagaacacataggacacagacccatctgcctgcatgttttgcttcctcatctcctttctacaccagggcacctgtgctcaattgctgttctcctctaaagagacttccttctgtaagtttgtgaaatgccatcgacaaacctgatcgcatcgcatttcactctgctgttgagttgatttttctttactttatcgtttgtaacttcttgctctacagagctttcaccttccacatatttcagattcattctttcctaaactgtgtggtggtctatgtcctcactgactatcaacatactgccatcatgcacttcctatctctattcctcttcgttgcaatctggctccaagtggctcacaccattattctgatctatcaactgcctacacagtcctagaaagtaagtgagtcaagaaacatcccccaaaagtaaacttttcaggtaagatcagaagaccctcatgagtcactgctgctcaggatcgtatctggctccttgaagagtgaccttgcatagatcttgtcataaaaaatgaaagagaccttgggaaggtcttgggctggtcacttttgtcagagtccagggctgtggggtgaaagccacagctatagagcttcattctggagtcacttagctttgctctcctggggacaggctgtgcctattcttgcctcaggcatcaaaaaaagtggcacagatgggcccttctgaaaaatctcactactggagcacagctcgaagtttctactatcctgacgttgggcggtagtcctttgctttgggaatatgaacatgatcaaaactgagtgaacttgtcttcctggctttctgtacaatgaagtagaacaaaccatccaatttgaccaaagccttggcatgttttctttctaggtttggaaagcacttctgtggaggcaccttaatatccccagagtgggtgctgactgctgctcactgcttgaagaagtacgtttaagggaaaactgacatggggtcttatcttcaagacttttttcctccctctcttcctccatcccttctttcttcccaccctccccttccttcctccccacctctcttccttttctggaaggaacactaggaaccagggaatgcatgcagaatcctgaggcagaatttccagggcaattggatgagagaggagggaagtgtttctagagggaatctgcagagggaagacccagtgcaagtgattttttggacctgtataaaccgcaggacagagctgttcactaccagaggcatcaatctgtattgcattgctctagagcaatatctgaggctgaataatttataaagaaaagagtttaattggcacatgtttctgcaggctttacaggaagcaggatgctgtcatctcctctgcttctgtgtgggcctaaggaagattacaatcatggtggagggcaaagtgggagcaggcatgtcacatggccagagcaggagcaagagacagagagagatggggtgggggtgctgcacaataccaaatgaccagactttgcaagaactaagagtgagagctcactgatcaccatgaagatgtggcccaagccattcaagagggatgcacctctatgatccaaacccctttcacaggccatagctccatcactggggactacagttgaacacgagatttaggtggggacaaatatacaaactatatcacagtctctgatgaaacagattgagaacagaccttaactgtcagtttccagcaaattgtgaattttgtttcttgccactcataagtcactgattctgggtggccgagggtgtcagagggacagcgccaagttcatggcacagaggatacctgaaggggctggaccatatttttctcttgacatcctcatcttttctaggtcctcaaggccttcatcctacaaggtcatcctgggtgcacaccaagaagtgaacctcgaatctcatgttcaggaaatagaagtgtctaggctgttcttggagcccacacaagcagatattgccttgctaaagctaagcaggtactcgctcacctgtggtcttcaccccacgctggtgaagatatttgctttatgtctgggttttatgggccatggccactgcatggcagtggggaggaactgtctatcacatgaaaggctcaagggctttggggacagcatcaatcttcaaccccagccctgccacatgttagttgtgctctttaaaaaggcagaaggattcgtttcctcacgtggaaaaagagataccctgttacccgtaaaacttacttaatgttcaccagttcatccacattcatgatcagggaaaggttgttattccaggctaactattctcctttcataataatatgctggagagaatcaaatgagattgcatttcaaagcgcttgaaaaaccaccatatcgagccatgcttagtgtgggcgcctctaatcactgctattcaggaggctgacgaggaagaattgcttgagcccaggacttcaaggctgtaggcagctatgattgtgccactgcactccaggctgggtgacagatcaagaccctgtctcaacaaaagaaaagaaaacaaaacaaatgaacagaaatattccacaatgtcaaaaaaaaaaaaaacccacacaacatacaatttacaaatgcaaataataatattattgttgtcttctttgattttctctttcctggtgaaattttgttttattaagcctgacaaagtgatacctttgcttacatcacttaaagttagtctatttggacctaggtgacagtacaatcagctaagaaacagtatttgtaggagaggcaggtttgggacaggtgacaaggcatgtggggtgctcgctgtgctggtggctctggaaggcagggtgtcaatgcagacagggatgagcatggcctggttgggaaggcatggggcaggcaggagcctgagctgctctcctgggcctggtcacaagcccatggcagcttctctgggtctgtgaactgaggggtgatgtcctggaatcctctgacactctaggaaggagagaagggcctttctggctcagcctttataaacagtagctgatctccctcttgctccccagggtcctccccaccatcccagcaaatgtgcaaatacaagatctctgctcctcatggtcctcagagagctggggtgttctgatggcttgaacaagtcacttaggaaatgtggggttttggaggcattctctgataggctgatacgttttgagtttagagttcccaccgcacatccccacacccctagagtctagggcatttagtgctccatgagggaacctgtagagtgaggacatctgcatcacaggctgggccttctagtgtccagaagcagaaagtgtgtctgcttcaaagttggtgctaatgatgatttttggtcagaatacggcatttctcatttccattcctttatccccttgaacttactaaagtagaatcaggtctaaaaaccagagttctaatctttaagagtccctgggattctaaggtatatgaatgtccttggaaaacaataccatttagttcatgcaaggtgcttatttcccatcctctttcatttgatgtctagcattttactgcattcttaccaccacggtttagtaacattcacgaggaggaagtggaggatccagatggagcaacttgctctgggcacacaaggcatttgcaattttataccctcttgatgatgtctcagccagacattctgcccagtcatcaatgccctcttcaattaatatgaaaggacacacttggcatgagattccaatcgtgcacagaatatacatgagaagtgtgcctttgtcatccctactttcaaaggctaaggccaccctcagtttcttgcatgcaactgatgcctttcaaatgaaaccttacatctgtgtagtccataggcaaccacaggcaaatgtgagggtgaaacgctgtgttctacattgttctgtgtcagtgaagcaaggcagtgccagctcagagggctctggggcttcaaggcagggatgcctggttgtaggtactgccacttccagctgggcagtgaaacataactgctaatactttccttacaggcctgccgtcatcactgacaaagtaatgccagcttgtctgccatccccagactacatggtcaccgccaggactgaatgttacatcactggctggggagaaacccaaggtgagatcaattccattgcccacgtaacaaattgtttttgaccttcagtgcatgttacaaaatgagcattttggagatagttgtacaaattcctacccatgaatgtggtctacccactcctgactttgcctggacacctgtctatgtctccataatcagtcttcaagggacttgggcaaggggagcggtgccatttccttgagtctctctcttttttgttttcagaatcttttaattttttttgtaatgattgtatgtttcccttacaacaaaaacaaacaccagtagaggtctttgagtctcttaatcataatttcagcattcatattgcttccccaggtaagtggggttttgacccagccctcaagttaagggtgttagattatttttcatgtgaaattagacagactgcgtttctaaacatggtgcaaaacagtaacgacaaaagttgtaattaaactattcttcttcccaaatacccacatgtctaatgtgtgtgtgagggtgttaggcaggggacctgaagctgggggagaggcagacagttcccatggccccaagtctaggatggcatttggtattggttgatgggtgagagcaagagagggaatatttttgtgcatgatgtggtatcagcacctgtactacattttatggattccttcttctctttgcggtatgccctgacaataattatatccgtcagccttacccccttggcagtaggaaaactgaaactgtcttaaagtctcagctctactttctcagaggtgcaggcaagggcactgggagtctggggccctggaaaactgttctgactctgccacttgccagatagacctgaactagacacgttacctctttgtaccacttggctctaatcccttatctgtaaaaccagcattttcaaatggtgctttgcacatcagccttttgcataagctttgatttgataaaatgttttttgtgtttttaaaaagattaaaaaccacaggtttagataatttcaaagtaggcttccctttttctgtcattttcctattatttttaaaacctcacctccttgactccttgttccctttttctgcactgctgagtctgggagcactgaggccaggtaaaaggaaacttggcaaatgaggggcacctatgggtgtgggaggctgctcctggtgtttgcatattttaaaatttaaatgctacaaaccactgtgagttaggtattattgttcctattttaccattgaggaagctggggctcagagaaggtggagggtggtacagacaaacctgaattggaaccctggctcctgcctatgggctgtcaggacttagaaaagtcgtgagctctcgctgattgtttcctcagctgatgtgggctgcagggctgttatgggggaaataataagaaagtgcatcaagtgctgagcacatcctaagcactccatcatggcagctcctactactaataaagaatagaattatatctaacatgattctttcttgcaagtgacagaaaatccaactcaaattggattaagcaaaacaagggaaattcttagtgagctgcaaagttttcaggctcacatgatggccccaaatcccaggtcctcccaatcatggagtaggcactatttgggggcacaaaggtgacattcccatggctgcagatgctgtggtgctgtggctgtaccgggaaagaataagaaaggccactctcccaattatgtgaacaatagtctgcccactctgagaagtcaaacttgggtcacagtcctgcccctgaacccatcactgactggctctgacctgcaccaattgttccatgttggaggtgaaggcaagaccccactaatacccataaggggcaaaagttagatagatccttcaagaggattatgggaggtagggcaaaaagctgctgggcagccagaaagcaaacagagcctctatgatacctcaactgatgaaagcatgaagctaaaatcataaggatctgggtgtgagttctggctctcccatcttccatgtgacattgggcagttatttaatctcttttagcctccgctttctcatcttacatatgagataattgtgaggattaagattacacataatcatcatcatcaccgtccaccactaccaccatcatccccatcaacatcatcgccaccactatcatcattcttactggcactaccatcaccatcaccaccattccaccaccatcaccaatatcatcactgtcaacatcattaccaccatcaccatcaccaccaccatcatcattactaccactaccactactaccaccatcaccatcaccaccattccaccaccatcaccaatatcatcactctcaacatcatcaccatcaccatcaccaccaccatcatcatcattactaccactaccactactaccaccatcaccatcaccactgtcccactactatcagcatgacatcaccatcaccaccaccatcatcattaccaccgctactaccaacatcaccatcaccacaattctactgccatcaccattaacattaccaccaccatcatcactatcaccatcaccaccatcatcaccactgccattatcactgccaccatcatcactatcctctatatttcctcatctgtattatcattactaccaccatcactatcaccaccatcgtcaccatcataatcaccatcaacaccatctccaataccaccatcactgtaaccatcatcaccaccaccatgatcactatcaccatcatcacaatgatcactgtaaccatcattactacccaccaccatcaccactactccaccaccatcaccattatcattaccatcaccattatcaccaccatcatcatcaccagcaccaccatcatcaccagcaccaccatcaccatcaccatcattaacaccatcactatcaccattggtttaatcatcaccaccatcatcataaataaacatcacataaccagggtgtagctgggtgttgaccccagagcccactcactgtttcctctctcccacccccatccacacatttctaaccaccatcctgcactgggctcccagtctcctctggtctcacccacatgtccactgagaaaaggattttcagaacaccaactagaccaggaggagccacatacataactcaggcctgcttatcaactttctacatgttaataatgacatcagatcaatgggtgttctcagcttctcagaaggaggtcaaaattctccccctctccccttcatgtgtccagaccttcccggatttggatgtaccaagtgcagagtggtgttgaggccaaggggctcatccatgtaagtctcatctgcaatcactgggctgatcccgtggccctgtctccagggcgccatcagagagggcttcaatcctcaggttacctgtggcccaccctgccctcagaggtgccatctctacattggccacgagatggcagcacatactcatagactgcattaatttcccagcaactcctggtgggttttccctcttatcaggatgtttgccttgctcagagagcaaatctgagagcagtgacacctaacttaactttcagcaaaatattttgagaagggtgcccctttacacatctgtgcagtccaggtgatgcatcccatgcccaatgctcggtagtcaggaggagcttcctccatgcagctctgcggaagagactcttccacgctgctcatgtaaactccagattcggtgtcagttttctgacaccgaagacaatgatctaagtgcagtcaagggctttggggaaagcaggagagagtgcctcagttctagcctgtgccatgcttgcaaagttttgcaaaattctaatgagagctgggcttgcaacattggaaacttggattatttgtgagagcactgagaaatccctgggcatgtccatctggaaaaacagcatttcctctggcactttagcagaggttctgtttcaatttggcgaaggaaattaagcagtttttcacaaaagaagaactacaacgaggagaattgtccctagtatttcttctccctaattgtcaaggaagtgtaaattagaaaatgaatcaggacaatttccacctactatgttagctaatattttaaaaattgaatatcacaagggtgaggcaaagtaattgttttccagtgacattttccactgtcacacccttttagagaataatttggcaatgttactgtgagatagaaatatgtctatataattatgggaactgagacttcagaaagtaataaggaataagaatgaaatttatgaacaaacatgtggaaggttggaagcaagagtggggccaacacgcatggggaggaagcatttgggcagcgactccgcagacccagactcaagctgagctatacaacctccttacgcctcagtttcctcaactgaagaacaggaatgacaagtgcctgtttcataggaccgttgtgaggattaagtgagatataccacattatgagcttgtgcctggaaaggttgattcttagtaaatgatgactattcttttttattgcaataaaatttatacaacatagagttactattttaaccatttttgcaggtaccactgagtggcattcagtacattcacaatggtgtgcaaccgtcaccatatttccaggacatttttctcatccccaaaggaaacctcatgcccattaagcagtcactcctcattaaaatattagttatgaagactgtagcatttttttaaaaactcatgatataacattgattgaaaaaatcagtataggaaattgtgcattatgatgtaatagtaaaagaagcatataaaaatctgaaaaaagtatataaaaagaatagcaattgtatttctcagactctctttacattgtaaaaatcattttgatagcttcaaaagaaaagcaaaaagtacacaaacaacaaccaaccccaaagcagcatgacaaagcccagattgttgaatccaggtcttgggaacataaaatcttatatgacatttgcactttaatgggtcagagagtccagtggcattgggagctgccttgtgttctgcagcctcacggacagacaggaggtccagctccactgctctgttcttctggaatttcctcgtgaacaagctttggcctcagtaaccatttctttcatctttttaaacacaggtacctttgggactggccttctcaaggaagcccagctccttgttattgagaatgaagtgtgcaatcactataagtatatttgtgctgagcatttggccagaggcactgacagttgccaggtaagaaaagatcaatagatcaaagtcttgtgctctcccgtctcagtctcagtcccttagacgtcagtcccaaagtggcaaattcaggaaggttttgtcagtggaagaccccagtctaagtgttgctcagaaactccccagatctgtccctgaatgcatattcagatcatctaaggagacgtcttggggcttgagttccagatccatagcaagggagccgtaagtgccataactacctcaggccactcaccttcctggtgtgtgctggtcaccagtgactgaagtggtggcttttccagtagagaggaaggtagagggtacaggaccgagacaaattacacacacttaacaatgatgtccaggctagcccagtctaaaggaaacaccaagttaggaagcaatgcatgcaggattcacaagggattattttttttcccaggaaaaaactaagtgatgtggttttgttgaatagactttgctaagtacttaagcactgcagatgcttgagtaatatgctcataagttcctttctgatttgaattactgggaaaatgtacatatggataagagaaggatggcatcccatattaaaaggttggcagcttaaagctcacatgaattttcccctacctctgtttagggtgacagtggagggcctctggtttgcttcgagaaggacaaatacattttacaaggagtcacttcttggggtcttggctgtgcacgccccaataagcctggtgtctatgctcgtgtttcaaggtttgttacttggattgagggaatgatgagaaataattaattggacgggagacagagtgaagcatcaacctacttagaagctgaaacgtgggtaaggatttagcatgctggaaataatagacagcaatcaaacgaagacactgttcccagctaccagctatgccaaaccttggcatttttggtatttttgtgtataagcttttaaggtctgactgacaaattctgtattaaggtgtcatagctatgacatttgttaaaaataaactctgcacttattttgatttgaa

SEQ ID NO: 543 - protein, 16 aa, Homo sapiens
MEHKEVVLLLLLFLKS

SEQ ID NO: 544 - protein, 54 aa, Homo sapiens
AAPEQSHVVQDCYHGDGQSYRGTYSTTVTGRTCQAWSSMTPHQHNRTTENYPNA

SEQ ID NO: 545 - protein, 60 aa, Homo sapiens
GLIMNYCRNPDAVAAPYCYTRDPGVRWEYCNLTQCSDAEGTAVAPPTVTPVPSLEAPSEQ

SEQ ID NO: 546 - protein, 54 aa, Homo sapiens
APTEQRPGVQECYHGNGQSYRGTYSTTVTGRTCQAWSSMTPHSHSRTPEYYPNA

SEQ ID NO: 547 - protein, 53 aa, Homo sapiens
GDSGGPLVCFEKDKYILQGVTSWGLGCARPNKPGVYARVSRFVTWIEGMMRNN

SEQ ID NO: 548 - protein, 60 aa, Homo sapiens
GLIMNYCRNPDPVAAPYCYTRDPSVRWEYCNLTQCSDAEGTAVAPPTITPIPSLEAPSEQ

SEQ ID NO: 549 - protein, 54 aa, Homo sapiens
APTEQRPGVQECYHGNGQSYQGTYFITVTGRTCQAWSSMTPHSHSRTPAYYPNA

SEQ ID NO: 550 - protein, 60 aa, Homo sapiens
GLIKNYCRNPDPVAAPWCYTTDPSVRWEYCNLTRCSDAEWTAFVPPNVILAPSLEAFFEQ

SEQ ID NO: 551 - DNA, 23 bp, synthetic construct
  source 1..23: mol_type = other DNA
cattatggacagagttaccgagg

SEQ ID NO: 552 - protein, 54 aa, Homo sapiens
ALTEETPGVQDCYYHYGQSYRGTYSTTVTGRTCQAWSSMTPHQHSRTPENYPNA

SEQ ID NO: 553 - DNA, 23 bp, synthetic construct
  source 1..23: mol_type = other DNA
gtagtagcagtcctgtaccccgg

SEQ ID NO: 554 - protein, 60 aa, Homo sapiens
GLTRNYCRNPDAEIRPWCYTMDPSVRWEYCNLTQCLVTESSVLATLTVVPDPSTEASSEE

SEQ ID NO: 555 - protein, 54 aa, Homo sapiens
APTEQSPGVQDCYHGDGQSYRGSFSTTVTGRTCQSWSSMTPHWHQRTTEYYPNG

SEQ ID NO: 556 - protein, 52 aa, Homo sapiens
GLTRNYCRNPDAEISPWCYTMDPNVRWEYCNLTQCPVTESSVLATSTAVSEQ

SEQ ID NO: 557 - DNA, 23 bp, synthetic construct
  source 1..23: mol_type = other DNA
aagtgtccttgcgacgtccacgg

SEQ ID NO: 558 - DNA, 23 bp, synthetic construct
  source 1..23: mol_type = other DNA
ctgtcactggacattgtgtcagg

SEQ ID NO: 559 - DNA, 23 bp, synthetic construct
  source 1..23: mol_type = other DNA
aaacagccgtggacgtcgcaagg

SEQ ID NO: 560 - DNA, 23 bp, synthetic construct
  source 1..23: mol_type = other DNA
tgaacaaggtaagaagtctctgg

SEQ ID NO: 561 - protein, 54 aa, Homo sapiens
APTEQSPTVQDCYHGDGQSYRGSFSTTVTGRTCQSWSSMTPHWHQRTTEYYPNG

SEQ ID NO: 562 - DNA, 23 bp, synthetic construct
  source 1..23: mol_type = other DNA
actgtggggctttgctccgttgg

SEQ ID NO: 563 - DNA, 23 bp, synthetic construct
  source 1..23: mol_type = other DNA
acagtccaggactgctaccatgg

SEQ ID NO: 564 - protein, 60 aa, Homo sapiens
GLTRNYCRNPDAEIRPWCYTMDPSVRWEYCNLTQCPVMESTLLTTPTVVPVPSTELPSEE

SEQ ID NO: 565 - protein, 54 aa, Homo sapiens
APTENSTGVQDCYRGDGQSYRGTLSTTITGRTCQSWSSMTPHWHRRIPLYYPNA

SEQ ID NO: 566 - protein, 60 aa, Homo sapiens
GLTRNYCRNPDAEIRPWCYTMDPSVRWEYCNLTRCPVTESSVLTTPTVAPVPSTEAPSEQ

SEQ ID NO: 567 - protein, 54 aa, Homo sapiens
APPEKSPVVQDCYHGDGRSYRGISSTTVTGRTCQSWSSMIPHWHQRTPENYPNA

SEQ ID NO: 568 - protein, 60 aa, Homo sapiens
GLTENYCRNPDSGKQPWCYTTDPCVRWEYCNLTQCSETESGVLETPTVVPVPSMEAHSEA

SEQ ID NO: 569 - protein, 54 aa, Homo sapiens
APTEQTPVVRQCYHGNGQSYRGTFSTTVTGRTCQSWSSMTPHRHQRTPENYPND

SEQ ID NO: 570 - protein, 60 aa, Homo sapiens
GLTMNYCRNPDADTGPWCFTMDPSIRWEYCNLTRCSDTEGTVVAPPTVIQVPSLGPPSEQ

SEQ ID NO: 571 - protein, 50 aa, Homo sapiens
DCMFGNGKGYRGKKATTVTGTPCQEWAAQEPHRHSTFIPGTNKWAGLEKN

SEQ ID NO: 572 - protein, 31 aa, Homo sapiens
YCRNPDGDINGPWCYTMNPRKLFDYCDIPLC

SEQ ID NO: 573 - protein, 41 aa, Homo sapiens
ASSSFDCGKPQVEPKKCPGSIVGGCVAHPHSWPWQVSLRTR

SEQ ID NO: 574 - protein, 25 aa, Homo sapiens
FGKHFCGGTLISPEWVLTAAHCLKK

SEQ ID NO: 575 - protein, 47 aa, Homo sapiens
SSRPSSYKVILGAHQEVNLESHVQEIEVSRLFLEPTQADIALLKLSR

SEQ ID NO: 576 - protein, 35 aa, Homo sapiens
PAVITDKVMPACLPSPDYMVTARTECYITGWGETQ

SEQ ID NO: 577 - protein, 40 aa, Homo sapiens
GTFGTGLLKEAQLLVIENEVCNHYKYICAEHLARGTDSCQ